United States Patent Application Publication US 2005/0100885 A1 - sequence listing, part 2

SEQ ID NO: 29747 - DNA, 29736 bp, SARS Coronavirus
ctacccaggaaaagccaaccaacctcgatctcttgtagatctgttctctaaacgaactttaaaatctgtgtagctgtcgctcggctgcatgcctagtgcacctacgcagtataaacaataataaattttactgtcgttgacaagaaacgagtaactcgtccctcttctgcagactgcttacggtttcgtccgtgttgcagtcgatcatcagcatacctaggtttcgtccgggtgtgaccgaaaggtaagatggagagccttgttcttggtgtcaacgagaaaacacacgtccaactcagtttgcctgtccttcaggttagagacgtgctagtgcgtggcttcggggactctgtggaagaggccctatcggaggcacgtgaacacctcaaaaatggcacttgtggtctagtagagctggaaaaaggcgtactgccccagcttgaacagccctatgtgttcattaaacgttctgatgccttaagcaccaatcacggccacaaggtcgttgagctggttgcagaaatggacggcattcagtacggtcgtagcggtataacactgggagtactcgtgccacatgtgggcgaaaccccaattgcataccgcaatgttcttcttcgtaagaacggtaataagggagccggtggtcatagctatggcatcgatctaaagtcttatgacttaggtgacgagcttggcactgatcccattgaagattatgaacaaaactggaacactaagcatggcagtggtgcactccgtgaactcactcgtgagctcaatggaggtgcagtcactcgctatgtcgacaacaatttctgtggcccagatgggtaccctcttgattgcatcaaagattttctcgcacgcgcgggcaagtcaatgtgcactctttccgaacaacttgattacatcgagtcgaagagaggtgtctactgctgccgtgaccatgagcatgaaattgcctggttcactgagcgctctgataagagctacgagcaccagacacccttcgaaattaagagtgccaagaaatttgacactttcaaaggggaatgcccaaagtttgtgtttcctcttaactcaaaagtcaaagtcattcaaccacgtgttgaaaagaaaaagactgagggtttcatggggcgtatacgctctgtgtaccctgttgcatctccacaggagtgtaacaatatgcacttgtctaccttgatgaaatgtaatcattgcgatgaagtttcatggcagacgtgcgactttctgaaagccacttgtgaacattgtggcactgaaaatttagttattgaaggacctactacatgtgggtacctacctactaatgctgtagtgaaaatgccatgtcctgcctgtcaagacccagagattggacctgagcatagtgttgcagattatcacaaccactcaaacattgaaactcgactccgcaagggaggtaggactagatgttttggaggctgtgtgtttgcctatgttggctgctataataagcgtgcctactgggttcctcgtgctagtgctgatattggctcaggccatactggcattactggtgacaatgtggagaccttgaatgaggatctccttgagatactgagtcgtgaacgtgttaacattaacattgttggcgattttcatttgaatgaagaggttgccatcattttggcatctttctctgcttctacaagtgcctttattgacactataaagagtcttgattacaagtctttcaaaaccattgttgagtcctgcggtaactataaagttaccaagggaaagcccgtaaaaggtgcttggaacattggacaacagagatcagttttaacaccactgtgtggttttccctcacaggctgctggtgttatcagatcaatttttgcgcgcacacttgatgcagcaaaccactcaattcctgatttgcaaagagcagctgtcaccatacttgatggtatttctgaacagtcattacgtcttgtcgacgccatggtttatacttcagacctgctcaccaacagtgtcattattatggcatatgtaactggtggtcttgtacaacagacttctcagtggttgtctaatcttttgggcactactgttgaaaaactcaggcctatctttgaatggattgaggcgaaacttagtgcaggagttgaatttctcaaggatgcttgggagattctcaaatttctcattacaggtgtttttgacatcgtcaagggtcaaatacaggttgcttcagataacatcaaggattgtgtaaaatgcttcattgatgttgttaacaaggcactcgaaatgtgcattgatcaagtcactatcgctggcgcaaagttgcgatcactcaacttaggtgaagtcttcatcgctcaaagcaagggactttaccgtcagtgtatacgtggcaaggagcagctgcaactactcatgcctcttaaggcaccaaaagaagtaacctttcttgaaggtgattcacatgacacagtacttacctctgaggaggttgttctcaagaacggtgaactcgaagcactcgagacgcccgttgatagcttcacaaatggagctatcgttggcacaccagtctgtgtaaatggcctcatgctcttagagattaaggacaaagaacaatactgcgcattgtctcctggtttactggctacaaacaatgtctttcgcttaaaagggggtgcaccaattaaaggtgtaacctttggagaagatactgtttgggaagttcaaggttacaagaatgtgagaatcacatttgagcttgatgaacgtgttgacaaagtgcttaatgaaaagtgctctgtctacactgttgaatccggtaccgaagttactgagtttgcatgtgttgtagcagaggctgttgtgaagactttacaaccagtttctgatctccttaccaacatgggtattgatcttgatgagtggagtgtagctacattctacttatttgatgatgctggtgaagaaaacttttcatcacgtatgtattgttccttttaccctccagatgaggaagaagaggacgatgcagagtgtgaggaagaagaaattgatgaaacctgtgaacatgagtacggtacagaggatgattatcaaggtctccctctggaatttggtgcctcagctgaaacagttcgagttgaggaagaagaagaggaagactggctggatgatactactgagcaatcagagattgagccagaaccagaacctacacctgaagaaccagttaatcagtttactggttatttaaaacttactgacaatgttgccattaaatgtgttgacatcgttaaggaggcacaaagtgctaatcctatggtgattgtaaatgctgctaacatacacctgaaacatggtggtggtgtagcaggtgcactcaacaaggcaaccaatggtgccatgcaaaaggagagtgatgattacattaagctaaatggccctcttacagtaggagggtcttgtttgctttctggacataatcttgctaagaagtgtctgcatgttgttggacctaacctaaatgcaggtgaggacatccagcttcttaaggcagcatatgaaaatttcaattcacaggacatcttacttgcaccattgttgtcagcaggcatatttggtgctaaaccacttcagtctttacaagtgtgcgtgcagacggttcgtacacaggtttatattgcagtcaatgacaaagctctttatgagcaggttgtcatggattatcttgataacctgaagcctagagtggaagcacctaaacaagaggagccaccaaacacagaagattccaaaactgaggagaaatctgtcgtacagaagcctgtcgatgtgaagccaaaaattaaggcctgcattgatgaggttaccacaacactggaagaaactaagtttcttaccaataagttactcttgtttgctgatatcaatggtaagctttaccatgattctcagaacatgcttagaggtgaagatatgtctttccttgagaaggatgcaccttacatggtaggtgatgttatcactagtggtgatatcacttgtgttgtaataccctccaaaaaggctggtggcactactgagatgctctcaagagctttgaagaaagtgccagttgatgagtatataaccacgtaccctggacaaggatgtgctggttatacacttgaggaagctaagactgctcttaagaaatgcaaatctgcattttatgtactaccttcagaagcacctaatgctaaggaagagattctaggaactgtatcctggaatttgagagaaatgcttgctcatgctgaagagacaagaaaattaatgcctatatgcatggatgttagagccataatggcaaccatccaacgtaagtataaaggaattaaaattcaagagggcatcgttgactatggtgtccgattcttcttttatactagtaaagagcctgtagcttctattattacgaagctgaactctctaaatgagccgcttgtcacaatgccaattggttatgtgacacatggttttaatcttgaagaggctgcgcgctgtatgcgttctcttaaagctcctgccgtagtgtcagtatcatcaccagatgctgttactacatataatggatacctcacttcgtcatcaaagacatctgaggagcactttgtagaaacagtttctttggctggctcttacagagattggtcctattcaggacagcgtacagagttaggtgttgaatttcttaagcgtggtgacaaaattgtgtaccacactctggagagccccgtcgagtttcatcttgacggtgaggttctttcacttgacaaactaaagagtctcttatccctgcgggaggttaagactataaaagtgttcacaactgtggacaacactaatctccacacacagcttgtggatatgtctatgacatatggacagcagtttggtccaacatacttggatggtgctgatgttacaaaaattaaacctcatgtaaatcatgagggtaagactttctttgtactacctagtgatgacacactacgtagtgaagctttcgagtactaccatactcttgatgagagttttcttggtaggtacatgtctgctttaaaccacacaaagaaatggaaatttcctcaagttggtggtttaacttcaattaaatgggctgataacaattgttatttgtctagtgttttattagcacttcaacagcttgaagtcaaattcaatgcaccagcacttcaagaggcttattatagagcccgtgctggtgatgctgctaacttttgtgcactcatactcgcttacagtaataaaactgttggcgagcttggtgatgtcagagaaactatgacccatcttctacagcatgctaatttggaatctgcaaagcgagttcttaatgtggtgtgtaaacattgtggtcagaaaactactaccttaacgggtgtagaagctgtgatgtatatgggtactctatcttatgataatcttaagacaggtgtttccattccatgtgtgtgtggtcgtgatgctacacaatatctagtacaacaagagtcttcttttgttatgatgtctgcaccacctgctgagtataaattacagcaaggtacattcttatgtgcgaatgagtacactggtaactatcagtgtggtcattacactcatataactgctaaggagaccctctatcgtattgacggagctcaccttacaaagatgtcagagtacaaaggaccagtgactgatgttttctacaaggaaacatcttacactacaaccatcaagcctgtgtcgtataaactcgatggagttacttacacagagattgaaccaaaattggatgggtattataaaaaggataatgcttactatacagagcagcctatagaccttgtaccaactcaaccattaccaaatgcgagttttgataatttcaaactcacatgttctaacacaaaatttgctgatgatttaaatcaaatgacaggcttcacaaagccagcttcacgagagctatctgtcacattcttcccagacttgaatggcgatgtagtggctattgactatagacactattcagcgagtttcaagaaaggtgctaaattactgcataagccaattgtttggcacattaaccaggctacaaccaagacaacgttcaaaccaaacacttggtgtttacgttgtctttggagtacaaagccagtagatacttcaaattcatttgaagttctggcagtagaagacacacaaggaatggacaatcttgcttgtgaaagtcaacaacccacctctgaagaagtagtggaaaatcctaccatacagaaggaagtcatagagtgtgacgtgaaaactaccgaagttgtaggcaatgtcatacttaaaccatcagatgaaggtgttaaagtaacacaagagttaggtcatgaggatcttatggctgcttatgtggaaaacacaagcattaccattaagaaacctaatgagctttcactagccttaggtttaaaaacaattgccactcatggtattgctgcaattaatagtgttccttggagtaaaattttggcttatgtcaaaccattcttaggacaagcagcaattacaacatcaaattgcgctaagagattagcacaacgtgtgtttaacaattatatgccttatgtgtttacattattgttccaattgtgtacttttactaaaagtaccaattctagaattagagcttcactacctacaactattgctaaaaatagtgttaagagtgttgctaaattatgtttggatgccggcattaattatgtgaagtcacccaaattttctaaattgttcacaatcgctatgtggctattgttgttaagtatttgcttaggttctctaatctgtgtaactgctgcttttggtgtactcttatctaattttggtgctccttcttattgtaatggcgttagagaattgtatcttaattcgtctaacgttactactatggatttctgtgaaggttcttttccttgcagcatttgtttaagtggattagactcccttgattcttatccagctcttgaaaccattcaggtgacgatttcatcgtacaagctagacttgacaattttaggtctggccgctgagtgggttttggcatatatgttgttcacaaaattcttttatttattaggtctttcagctataatgcaggtgttctttggctattttgctagtcatttcatcagcaattcttggctcatgtggtttatcattagtattgtacaaatggcacccgtttctgcaatggttaggatgtacatcttctttgcttctttctactacatatggaagagctatgttcatatcatggatggttgcacctcttcgacttgcatgatgtgctataagcgcaatcgtgccacacgcgttgagtgtacaactattgttaatggcatgaagagatctttctatgtctatgcaaatggaggccgtggcttctgcaagactcacaattggaattgtctcaattgtgacacattttgcactggtagtacattcattagtgatgaagttgctcgtgatttgtcactccagtttaaaagaccaatcaaccctactgaccagtcatcgtatattgttgatagtgttgctgtgaaaaatggcgcgcttcacctctactttgacaaggctggtcaaaagacctatgagagacatcctctctcccattttgtcaatttagacaatttgagagctaacaacactaaaggttcactgcctattaatgtcatagtttttgatggcaagtccaaatgcgacgagtctgcttctaagtctgcttctgtgtactacagtcagctgatgtgccaacctattctgttgcttgaccaagctcttgtatcagacgttggagatagtactgaagtttccgttaagatgtttgatgcttatgtcgacaccttttcagcaacttttagtgttcctatggaaaaacttaaggcacttgttgctacagctcacagcgagttagcaaagggtgtagctttagatggtgtcctttctacattcgtgtcagctgcccgacaaggtgttgttgataccgatgttgacacaaaggatgttattgaatgtctcaaactttcacatcactctgacttagaagtgacaggtgacagttgtaacaatttcatgctcacctataataaggttgaaaacatgacgcccagagatcttggcgcatgtattgactgtaatgcaaggcatatcaatgcccaagtagcaaaaagtcacaatgtttcactcatctggaatgtaaaagactacatgtctttatctgaacagctgcgtaaacaaattcgtagtgctgccaagaagaacaacataccttttagactaacttgtgctacaactagacaggttgtcaatgtcataactactaaaatctcactcaagggtggtaagattgttagtacttgttttaaacttatgcttaaggccacattattgtgcgttcttgctgcattggtttgttatatcgttatgccagtacatacattgtcaatccatgatggttacacaaatgaaatcattggttacaaagccattcaggatggtgtcactcgtgacatcatttctactgatgattgttttgcaaataaacatgctggttttgacgcatggtttagccagcgtggtggttcatacaaaaatgacaaaagctgccctgtagtagctgctatcattacaagagagattggtttcatagtgcctggcttaccgggtactgtgctgagagcaatcaatggtgacttcttgcattttctacctcgtgtttttagtgctgttggcaacatttgctacacaccttccaaactcattgagtatagtgattttgctacctctgcttgcgttcttgctgctgagtgtacaatttttaaggatgctatgggcaaacctgtgccatattgttatgacactaatttgctagagggttctatttcttatagtgagcttcgtccagacactcgttatgtgcttatggatggttccatcatacagtttcctaacacttacctggagggttctgttagagtagtaacaacttttgatgctgagtactgtagacatggtacatgcgaaaggtcagaagtaggtatttgcctatctaccagtggtagatgggttcttaataatgagcattacagagctctatcaggagttttctgtggtgttgatgcgatgaatctcatagctaacatctttactcctcttgtgcaacctgtgggtgctttagatgtgtctgcttcagtagtggctggtggtattattgccatattggtgacttgtgctgcctactactttatgaaattcagacgtgcttttggtgagtacaaccatgttgttgctgctaatgcacttttgtttttgatgtctttcactatactctgtctggcaccagcttacagctttctgccgggagtctactcagtcttttacttgtacttgacattctatttcaccaatgatgtttcattcttggctcaccttcaatggtttgccatgttttctcctattgtgcctttttggataacagcaatctatgtattctgtatttctctgaagcactgccattggttctttaacaactatcttaggaaaagagtcatgtttaatggagttacatttagtaccttcgaggaggctgctttgtgtacctttttgctcaacaaggaaatgtacctaaaattgcgtagcgagacactgttgccacttacacagtataacaggtatcttgctctatataacaagtacaagtatttcagtggagccttagatactaccagctatcgtgaagcagcttgctgccacttagcaaaggctctaaatgactttagcaactcaggtgctgatgttctctaccaaccaccacagacatcaatcacttctgctgttctgcagagtggttttaggaaaatggcattcccgtcaggcaaagttgaagggtgcatggtacaagtaacctgtggaactacaactcttaatggattgtggttggatgacacagtatactgtccaagacatgtcatttgcacagcagaagacatgcttaatcctaactatgaagatctgctcattcgcaaatccaaccatagctttcttgttcaggctggcaatgttcaacttcgtgttattggccattctatgcaaaattgtctgcttaggcttaaagttgatacttctaaccctaagacacccaagtataaatttgtccgtatccaacctggtcaaacattttcagttctagcatgctacaatggttcaccatctggtgtttatcagtgtgccatgagacctaatcataccattaaaggttctttccttaatggatcatgtggtagtgttggttttaacattgattatgattgcgtgtctttctgctatatgcatcatatggagcttccaacaggagtacacgctggtactgacttagaaggtaaattctatggtccatttgttgacagacaaactgcacaggctgcaggtacagacacaaccataacattaaatgttttggcatggctgtatgctgctgttatcaatggtgataggtggtttcttaatagattcaccactactttgaatgactttaaccttgtggcaatgaagtacaactatgaacctttgacacaagatcatgttgacatattgggacctctttctgctcaaacaggaattgccgtcttagatatgtgtgctgctttgaaagagctgctgcagaatggtatgaatggtcgtactatccttggtagcactattttagaagatgagtttacaccatttgatgttgttagacaatgctctggtgttaccttccaaggtaagttcaagaaaattgttaagggcactcatcattggatgcttttaactttcttgacatcactattgattcttgttcaaagtacacagtggtcactgtttttctttgtttacgagaatgctttcttgccatttactcttggtattatggcaattgctgcatgtgctatgctgcttgttaagcataagcacgcattcttgtgcttgtttctgttaccttctcttgcaacagttgcttactttaatatggtctacatgcctgctagctgggtgatgcgtatcatgacatggcttgaattggctgacactagcttgtctggttataggcttaaggattgtgttatgtatgcttcagctttagttttgcttattctcatgacagctcgcactgtttatgatgatgctgctagacgtgtttggacactgatgaatgtcattacacttgtttacaaagtctactatggtaatgctttagatcaagctatttccatgtgggccttagttatttctgtaacctctaactattctggtgtcgttacgactatcatgtttttagctagagctatagtgtttgtgtgtgttgagtattacccattgttatttattactggcaacaccttacagtgtatcatgcttgtttattgtttcttaggctattgttgctgctgctactttggccttttctgtttactcaaccgttacttcaggcttactcttggtgtttatgactacttggtctctacacaagaatttaggtatatgaactcccaggggcttttgcctcctaagagtagtattgatgctttcaagcttaacattaagttgttgggtattggaggtaaaccatgtatcaaggttgctactgtacagtctaaaatgtctgacgtaaagtgcacatctgtggtactgctctcggttcttcaacaacttagagtagagtcatcttctaaattgtgggcacaatgtgtacaactccacaatgatattcttcttgcaaaagacacaactgaagctttcgagaagatggtttctcttttgtctgttttgctatccatgcagggtgctgtagacattaataggttgtgcgaggaaatgctcgataaccgtgctactcttcaggctattgcttcagaatttagttctttaccatcatatgccgcttatgccactgcccaggaggcctatgagcaggctgtagctaatggtgattctgaagtcgttctcaaaaagttaaagaaatctttgaatgtggctaaatctgagtttgaccgtgatgctgccatgcaacgcaagttggaaaagatggcagatcaggctatgacccaaatgtacaaacaggcaagatctgaggacaagagggcaaaagtaactagtgctatgcaaacaatgctcttcactatgcttaggaagcttgataatgatgcacttaacaacattatcaacaatgcgcgtgatggttgtgttccactcaacatcataccattgactacagcagccaaactcatggttgttgtccctgattatggtacctacaagaacacttgtgatggtaacacctttacatatgcatctgcactctgggaaatccagcaagttgttgatgcggatagcaagattgttcaacttagtgaaattaacatggacaattcaccaaatttggcttggcctcttattgttacagctctaagagccaactcagctgttaaactacagaataatgaactgagtccagtagcactacgacagatgtcctgtgcggctggtaccacacaaacagcttgtactgatgacaatgcacttgcctactataacaattcgaagggaggtaggtttgtgctggcattactatcagaccaccaagatctcaaatgggctagattccctaagagtgatggtacaggtacaatttacacagaactggaaccaccttgtaggtttgttacagacacaccaaaagggcctaaagtgaaatacttgtacttcatcaaaggcttaaacaacctaaatagaggtatggtgctgggcagtttagctgctacagtacgtcttcaggctggaaatgctacagaagtacctgccaattcaactgtgctttccttctgtgcttttgcagtagaccctgctaaagcatataaggattacctagcaagtggaggacaaccaatcaccaactgtgtgaagatgttgtgtacacacactggtacaggacaggcaattactgtaacaccagaagctaacatggaccaagagtcctttggtggtgcttcatgttgtctgtattgtagatgccacattgaccatccaaatcctaaaggattctgtgacttgaaaggtaagtacgtccaaatacctaccacttgtgctaatgacccagtgggttttacacttagaaacacagtctgtaccgtctgcggaatgtggaaaggttatggctgtagttgtgaccaactccgcgaacccttgatgcagtctgcggatgcatcaacgtttttaaacgggtttgcggtgtaagtgcagcccgtcttacaccgtgcggcacaggcactagtactgatgtcgtctacagggcttttgatatttacaacgaaaaagttgctggttttgcaaagttcctaaaaactaattgctgtcgcttccaggagaaggatgaggaaggcaatttattagactcttactttgtagttaagaggcatactatgtctaactaccaacatgaagagactatttataacttggttaaagattgtccagcggttgctgtccatgactttttcaagtttagagtagatggtgacatggtaccacatatatcacgtcagcgtctaactaaatacacaatggctgatttagtctatgctctacgtcattttgatgagggtaattgtgatacattaaaagaaatactcgtcacatacaattgctgtgatgatgattatttcaataagaaggattggtatgacttcgtagagaatcctgacatcttacgcgtatatgctaacttaggtgagcgtgtacgccaatcattattaaagactgtacaattctgcgatgctatgcgtgatgcaggcattgtaggcgtactgacattagataatcaggatcttaatgggaactggtacgatttcggtgatttcgtacaagtagcaccaggctgcggagttcctattgtggattcatattactcattgctgatgcccatcctcactttgactagggcattggctgctgagtcccatatggatgctgatctcgcaaaaccacttattaagtgggatttgctgaaatatgattttacggaagagagactttgtctcttcgaccgttattttaaatattgggaccagacataccatcccaattgtattaactgtttggatgataggtgtatccttcattgtgcaaactttaatgtgttattttctactgtgtttccacctacaagttttggaccactagtaagaaaaatatttgtagatggtgttccttttgttgtttcaactggataccattttcgtgagttaggagtcgtacataatcaggatgtaaacttacatagctcgcgtctcagtttcaaggaacttttagtgtatgctgctgatccagctatgcatgcagcttctggcaatttattgctagataaacgcactacatgcttttcagtagctgcactaacaaacaatgttgcttttcaaactgtcaaacccggtaattttaataaagacttttatgactttgctgtgtctaaaggtttctttaaggaaggaagttctgttgaactaaaacacttcttctttgctcaggatggcaacgctgctatcagtgattatgactattatcgttataatctgccaacaatgtgtgatatcagacaactcctattcgtagttgaagttgttgataaatactttgattgttacgatggtggctgtattaatgccaaccaagtaatcgttaacaatctggataaatcagctggtttcccatttaataaatggggtaaggctagactttattatgactcaatgagttatgaggatcaagatgcacttttcgcgtatactaagcgtaatgtcatccctactataactcaaatgaatcttaagtatgccattagtgcaaagaatagagctcgcaccgtagctggtgtctctatctgtagtactatgacaaatagacagtttcatcagaaattattgaagtcaatagccgccactagaggagctactgtggtaattggaacaagcaagttttacggtggctggcataatatgttaaaaactgtttacagtgatgtagaaactccacaccttatgggttgggattatccaaaatgtgacagagccatgcctaacatgcttaggataatggcctctcttgttcttgctcgcaaacataacacttgctgtaacttatcacaccgtttctacaggttagctaacgagtgtgcgcaagtattaagtgagatggtcatgtgtggcggctcactatatgttaaaccaggtggaacatcatccggtgatgctacaactgcttatgctaatagtgtctttaacatttgtcaagctgttacagccaatgtaaatgcacttctttcaactgatggtaataagatagctgacaagtatgtccgcaatctacaacacaggctctatgagtgtctctatagaaatagggatgttgatcatgaattcgtggatgagttttacgcttacctgcgtaaacatttctccatgatgattctttctgatgatgccgttgtgtgctataacagtaactatgcggctcaaggtttagtagctagcattaagaactttaaggcagttctttattatcaaaataatgtgttcatgtctgaggcaaaatgttggactgagactgaccttactaaaggacctcacgaattttgctcacagcatacaatgctagttaaacaaggagatgattacgtgtacctgccttacccagatccatcaagaatattaggcgcaggctgttttgtcgatgatattgtcaaaacagatggtacacttatgattgaaaggttcgtgtcactggctattgatgcttacccacttacaaaacatcctaatcaggagtatgctgatgtctttcacttgtatttacaatacattagaaagttacatgatgagcttactggccacatgttggacatgtattccgtaatgctaactaatgataacacctcacggtactgggaacctgagttttatgaggctatgtacacaccacatacagtcttgcaggctgtaggtgcttgtgtattgtgcaattcacagacttcacttcgttgcggtgcctgtattaggagaccattcctatgttgcaagtgctgctatgaccatgtcatttcaacatcacacaaattagtgttgtctgttaatccctatgtttgcaatgccccaggttgtgatgtcactgatgtgacacaactgtatctaggaggtatgagctattattgcaagtcacataagcctcccattagttttccattatgtgctaatggtcaggtttttggtttatacaaaaacacatgtgtaggcagtgacaatgtcactgacttcaatgcgatagcaacatgtgattggactaatgctggcgattacatacttgccaacacttgtactgagagactcaagcttttcgcagcagaaacgctcaaagccactgaggaaacatttaagctgtcatatggtattgccactgtacgcgaagtactctctgacagagaattgcatctttcatgggaggttggaaaacctagaccaccattgaacagaaactatgtctttactggttaccgtgtaactaaaaatagtaaagtacagattggagagtacacctttgaaaaaggtgactatggtgatgctgttgtgtacagaggtactacgacatacaagttgaatgttggtgattactttgtgttgacatctcacactgtaatgccacttagtgcacctactctagtgccacaagagcactatgtgagaattactggcttgtacccaacactcaacatctcagatgagttttctagcaatgttgcaaattatcaaaaggtcggcatgcaaaagtactctacactccaaggaccacctggtactggtaagagtcattttgccatcggacttgctctctattacccatctgctcgcatagtgtatacggcatgctctcatgcagctgttgatgccctatgtgaaaaggcattaaaatatttgcccatagataaatgtagtagaatcatacctgcgcgtgcgcgcgtagagtgttttgataaattcaaagtgaattcaacactagaacagtatgttttctgcactgtaaatgcattgccagaaacaactgctgacattgtagtctttgatgaaatctctatggctactaattatgacttgagtgttgtcaatgctagacttcgtgcaaaacactacgtctatattggcgatcctgctcaattaccagccccccgcacattgctgactaaaggcacactagaaccagaatattttaattcagtgtgcagacttatgaaaacaataggtccagacatgttccttggaacttgtcgccgttgtcctgctgaaattgttgacactgtgagtgctttagtttatgacaataagctaaaagcacacaaggagaagtcagctcaatgcttcaaaatgttctacaaaggtgttattacacatgatgtttcatctgcaatcaacagacctcaaataggcgttgtaagagaatttcttacacgcaatcctgcttggagaaaagctgtttttatctcaccttataattcacagaacgctgtagcttcaaaaatcttaggattgcctacgcagactgttgattcatcacagggttctgaatatgactatgtcatattcacacaaactactgaaacagcacactcttgtaatgtcaaccgtttcaatgtggctatcacaagggcaaaaattggcattttgtgcataatgtctgatagagatctttatgacaaactgcaatttacaagtctagaaataccacgtcgcaatgtggctacattacaagcagaaaatgtaactggactttttaaggactgtagtaagatcattactggtcttcatcctacacaggcacctacacacctcagcgttgatataaagttcaagactgaaggattatgtgttgacataccaggcataccaaaggacatgacctaccgtagactcatctctatgatgggtttcaaaatgaattaccaagtcaatggttaccctaatatgtttatcacccgcgaagaagctattcgtcacgttcgtgcgtggattggctttgatgtagagggctgtcatgcaactagagatgctgtgggtactaacctacctctccagctaggattttctacaggtgttaacttagtagctgtaccgactggttatgttgacactgaaaataacacagaattcaccagagttaatgcaaaacctccaccaggtgaccagtttaaacatcttataccactcatgtataaaggcttgccctggaatgtagtgcgtattaagatagtacaaatgctcagtgatacactgaaaggattgtcagacagagtcgtgttcgtcctttgggcgcatggctttgagcttacatcaatgaagtactttgtcaagattggacctgaaagaacgtgttgtctgtgtgacaaacgtgcaacttgcttttctacttcatcagatacttatgcctgctggaatcattctgtgggttttgactatgtctataacccatttatgattgatgttcagcagtggggctttacgggtaaccttcagagtaaccatgaccaacattgccaggtacatggaaatgcacatgtggctagttgtgatgctatcatgactagatgtttagcagtccatgagtgctttgttaagcgcgttgattggtctgttgaataccctattataggagatgaactgagggttaattctgcttgcagaaaagtacaacacatggttgtgaagtctgcattgcttgctgataagtttccagttcttcatgacattggaaatccaaaggctatcaagtgtgtgcctcaggctgaagtagaatggaagttctacgatgctcagccatgtagtgacaaagcttacaaaatagaggagctcttctattcttatgctacacatcacgataaattcactgatggtgtttgtttgttttggaattgtaacgttgatcgttacccagccaatgcaattgtgtgtaggtttgacacaagagtcttgtcaaacttgaacttaccaggctgtgatggtggtagtttgtatgtgaataagcatgcattccacactccagctttcgataaaagtgcatttactaatttaaagcaattgcctttcttttactattctgatagtccttgtgagtctcatggcaaacaagtagtgtcggatattgattatgttccactcaaatctgctacgtgtattacacgatgcaatttaggtggtgctgtttgcagacaccatgcaaatgagtaccgacagtacttggatgcatataatatgatgatttctgctggatttagcctatggatttacaaacaatttgatacttataacctgtggaatacatttaccaggttacagagtttagaaaatgtggcttataatgttgttaataaaggacactttgatggacacgccggcgaagcacctgtttccatcattaataatgctgtttacacaaaggtagatggtattgatgtggagatctttgaaaataagacaacacttcctgttaatgttgcatttgagctttgggctaagcgtaacattaaaccagtgccagagattaagatactcaataatttgggtgttgatatcgctgctaatactgtaatctgggactacaaaagagaagccccagcacatgtatctacaataggtgtctgcacaatgactgacattgccaagaaacctactgagagtgcttgttcttcacttactgtcttgtttgatggtagagtggaaggacaggtagacctttttagaaacgcccgtaatggtgttttaataacagaaggttcagtcaaaggtctaacaccttcaaagggaccagcacaagctagcgtcaatggagtcacattaattggagaatcagtaaaaacacagtttaactactttaagaaagtagacggcattattcaacagttgcctgaaacctactttactcagagcagagacttagaggattttaagcccagatcacaaatggaaactgactttctcgagctcgctatggatgaattcatacagcgatataagctcgagggctatgccttcgaacacatcgtttatggagatttcagtcatggacaacttggcggtcttcatttaatgataggcttagccaagcgctcacaagattcaccacttaaattagaggattttatccctatggacagcacagtgaaaaattacttcataacagatgcgcaaacaggttcatcaaaatgtgtgtgttctgtgattgatcttttacttgatgactttgtcgagataataaagtcacaagatttgtcagtgatttcaaaagtggtcaaggttacaattgactatgctgaaatttcattcatgctttggtgtaaggatggacatgttgaaaccttctacccaaaactacaagcaagtcaagcgtggcaaccaggtgttgcgatgcctaacttgtacaagatgcaaagaatgcttcttgaaaagtgtgaccttcagaattatggtgaaaatgctgttataccaaaaggaataatgatgaatgtcgcaaagtatactcaactgtgtcaatacttaaatacacttactttagctgtaccctacaacatgagagttattcactttggtgctggctctgataaaggagttgcaccaggtacagctgtgctcagacaatggttgccaactggcacactacttgtcgattcagatcttaatgacttcgtctccgacgcagattctactttaattggagactgtgcaacagtacatacggctaataaatgggaccttattattagcgatatgtatgaccctaggaccaaacatgtgacaaaagagaatgactctaaagaagggtttttcacttatctgtgtggatttataaagcaaaaactagccctgggtggttctatagctgtaaagataacagagcattcttggaatgctgacctttacaagcttatgggccatttctcatggtggacagcttttgttacaaatgtaaatgcatcatcatcggaagcatttttaattggggctaactatcttggcaagccgaaggaacaaattgatggctataccatgcatgctaactacattttctggaggaacacaaatcctatccagttgtcttcctattcactctttgacatgagcaaatttcctcttaaattaagaggaactgctgtaatgtctcttaaggagaatcaaatcaatgatatgatttattctcttctggaaaaaggtaggcttatcattagagaaaacaacagagttgtggtttcaagtgatattcttgttaacaactaaacgaacatgtttattttcttattatttcttactctcactagtggtagtgaccttgaccggtgcaccacttttgatgatgttcaagctcctaattacactcaacatacttcatctatgaggggggtttactatcctgatgaaatttttagatcagacactctttatttaactcaggatttatttcttccattttattctaatgttacagggtttcatactattaatcatacgtttgacaaccctgtcataccttttaaggatggtatttattttgctgccacagagaaatcaaatgttgtccgtggttgggtttttggttctaccatgaacaacaagtcacagtcggtgattattattaacaattctactaatgttgttatacgagcatgtaactttgaattgtgtgacaaccctttctttgctgtttctaaacccatgggtacacagacacatactatgatattcgataatgcatttaattgcactttcgagtacatatctgatgccttttcgcttgatgtttcagaaaagtcaggtaattttaaacacttacgagagtttgtgtttaaaaataaagatgggtttctctatgtttataagggctatcaacctatagatgtagttcgtgatctaccttctggttttaacactttgaaacctatttttaagttgcctcttggtattaacattacaaattttagagccattcttacagccttttcacctgctcaagacacttggggcacgtcagctgcagcctattttgttggctatttaaagccaactacatttatgctcaagtatgatgaaaatggtacaatcacagatgctgttgattgttctcaaaatccacttgctgaactcaaatgctctgttaagagctttgagattgacaaaggaatttaccagacctctaatttcagggttgttccctcaggagatgttgtgagattccctaatattacaaacttgtgtccttttggagaggtttttaatgctactaaattcccttctgtctatgcatgggagagaaaaaaaatttctaattgtgttgctgattactctgtgctctacaactcaacatttttttcaacctttaagtgctatggcgtttctgccactaagttgaatgatctttgcttctccaatgtctatgcagattcttttgtagtcaagggagatgatgtaagacaaatagcgccaggacaaactggtgttattgctgattataattataaattgccagatgatttcatgggttgtgtccttgcttggaatactaggaacattgatgctacttcaactggtaattataattataaatataggtatcttagacatggcaagcttaggccctttgagagagacatatctaatgtgcctttctcccctgatggcaaaccttgcaccccacctgctcttaattgttattggccattaaatgattatggtttttacaccactactggcattggctaccaaccttacagagttgtagtactttcttttgaacttttaaatgcaccggccacggtttgtggaccaaaattatccactgaccttattaagaaccagtgtgtcaattttaattttaatggactcactggtactggtgtgttaactccttcttcaaagagatttcaaccatttcaacaatttggccgtgatgtttctgatttcactgattccgttcgagatcctaaaacatctgaaatattagacatttcaccttgctcttttgggggtgtaagtgtaattacacctggaacaaatgcttcatctgaagttgctgttctatatcaagatgttaactgcactgatgtttctacagcaattcatgcagatcaactcacaccagcttggcgcatatattctactggaaacaatgtattccagactcaagcaggctgtcttataggagctgagcatgtcgacacttcttatgagtgcgacattcctattggagctggcatttgtgctagttaccatacagtttctttattacgtagtactagccaaaaatctattgtggcttatactatgtctttaggtgctgatagttcaattgcttactctaataacaccattgctatacctactaacttttcaattagcattactacagaagtaatgcctgtttctatggctaaaacctccgtagattgtaatatgtacatctgcggagattctactgaatgtgctaatttgcttctccaatatggtagcttttgcacacaactaaatcgtgcactctcaggtattgctgctgaacaggatcgcaacacacgtgaagtgttcgctcaagtcaaacaaatgtacaaaaccccaactttgaaatattttggtggttttaatttttcacaaatattacctgaccctctaaagccaactaagaggtcttttattgaggacttgctctttaataaggtgacactcgctgatgctggcttcatgaagcaatatggcgaatgcctaggtgatattaatgctagagatctcatttgtgcgcagaagttcaatggacttacagtgttgccacctctgctcactgatgatatgattgctgcctacactgctgctctagttagtggtactgccactgctggatggacatttggtgctggcgctgctcttcaaataccttttgctatgcaaatggcatataggttcaatggcattggagttacccaaaatgttctctatgagaaccaaaaacaaatcgccaaccaatttaacaaggcgattagtcaaattcaagaatcacttacaacaacatcaactgcattgggcaagctgcaagacgttgttaaccagaatgctcaagcattaaacacacttgttaaacaacttagctctaattttggtgcaatttcaagtgtgctaaatgatatcctttcgcgacttgataaagtcgaggcggaggtacaaattgacaggttaattacaggcagacttcaaagccttcaaacctatgtaacacaacaactaatcagggctgctgaaatcagggcttctgctaatcttgctgctactaaaatgtctgagtgtgttcttggacaatcaaaaagagttgacttttgtggaaagggctaccaccttatgtccttcccacaagcagccccgcatggtgttgtcttcctacatgtcacgtatgtgccatcccaggagaggaacttcaccacagcgccagcaatttgtcatgaaggcaaagcatacttccctcgtgaaggtgtttttgtgtttaatggcacttcttggtttattacacagaggaacttcttttctccacaaataattactacagacaatacatttgtctcaggaaattgtgatgtcgttattggcatcattaacaacacagtttatgatcctctgcaacctgagcttgactcattcaaagaagagctggacaagtacttcaaaaatcatacatcaccagatgttgatcttggcgacatttcaggcattaacgcttctgtcgtcaacattcaaaaagaaattgaccgcctcaatgaggtcgctaaaaatttaaatgaatcactcattgaccttcaagaattgggaaaatatgagcaatatattaaatggccttggtatgtttggctcggcttcattgctggactaattgccatcgtcatggttacaatcttgctttgttgcatgactagttgttgcagttgcctcaagggtgcatgctcttgtggttcttgctgcaagtttgatgaggatgactctgagccagttctcaagggtgtcaaattacattacacataaacgaacttatggatttgtttatgagattttttactcttggatcaattactgcacagccagtaaaaattgacaatgcttctcctgcaagtactgttcatgctacagcaacgataccgctacaagcctcactccctttcggatggcttgttattggcgttgcatttcttgctgtttttcagagcgctaccaaaataattgcgctcaataaaagatggcagctagccctttataagggcttccagttcatttgcaatttactgctgctatttgttaccatctattcacatcttttgcttgtcgctgcaggtatggaggcgcaatttttgtacctctatgccttgatatattttctacaatgcatcaacgcatgtagaattattatgagatgttggctttgttggaagtgcaaatccaagaacccattactttatgatgccaactactttgtttgctggcacacacataactatgactactgtataccatataacagtgtcacagatacaattgtcgttactgaaggtgacggcatttcaacaccaaaactcaaagaagactaccaaattggtggttattctgaggataggcactcaggtgttaaagactatgtcgttgtacatggctatttcaccgaagtttactaccagcttgagtctacacaaattactacagacactggtattgaaaatgctacattcttcatctttaacaagcttgttaaagacccaccgaatgtgcaaatacacacaatcgacggctcttcaggagttgctaatccagcaatggatccaatttatgatgagccgacgacgactactagcgtgcctttgtaagcacaagaaagtgagtacgaacttatgtactcattcgtttcggaagaaacaggtacgttaatagttaatagcgtacttctttttcttgctttcgtggtattcttgctagtcacactagccatccttactgcgcttcgattgtgtgcgtactgctgcaatattgttaacgtgagtttagtaaaaccaacggtttacgtctactcgcgtgttaaaaatctgaactcttctgaaggagttcctgatcttctggtctaaacgaactaactattattattattctgtttggaactttaacattgcttatcatggcagacaacggtactattaccgttgaggagcttaaacaactcctggaacaatggaacctagtaataggtttcctattcctagcctggattatgttactacaatttgcctattctaatcggaacaggtttttgtacataataaagcttgttttcctctggctcttgtggccagtaacacttgcttgttttgtgcttgctgctgtctacagaattaattgggtgactggcgggattgcgattgcaatggcttgtattgtaggcttgatgtggcttagctacttcgttgcttccttcaggctgtttgctcgtacccgctcaatgtggtcattcaacccagaaacaaacattcttctcaatgtgcctctccgggggacaattgtgaccagaccgctcatggaaagtgaacttgtcattggtgctgtgatcattcgtggtcacttgcgaatggccggacactccctagggcgctgtgacattaaggacctgccaaaagagatcactgtggctacatcacgaacgctttcttattacaaattaggagcgtcgcagcgtgtaggcactgattcaggttttgctgcatacaaccgctaccgtattggaaactataaattaaatacagaccacgccggtagcaacgacaatattgctttgctagtacagtaagtgacaacagatgtttcatcttgttgacttccaggttacaatagcagagatattgattatcattatgaggactttcaggattgctatttggaatcttgacgttataataagttcaatagtgagacaattatttaagcctctaactaagaagaattattcggagttagatgatgaagaacctatggagttagattatccataaaacgaacatgaaaattattctcttcctgacattgattgtatttacatcttgcgagctatatcactatcaggagtgtgttagaggtacgactgtactactaaaagaaccttgcccatcaggaacatacgagggcaattcaccatttcaccctcttgctgacaataaatttgcactaacttgcactagcacacactttgcttttgcttgtgctgacggtactcgacatacctatcagctgcgtgcaagatcagtttcaccaaaacttttcatcagacaagaggaggttcaacaagagctctactcgccactttttctcattgttgctgctctagtatttttaatactttgcttcaccattaagagaaagacagaatgaatgagctcactttaattgacttctatttgtgctttttagcctttctgctattccttgttttaataatgcttattatattttggttttcactcgaaatccaggatctagaagaaccttgtaccaaagtctaaacgaacatgaaacttctcattgttttgacttgtatttctctatgcagttgcatacgcactgtagtacagcgctgtgcatctaataaacctcatgtgcttgaagatccttgtaaggtacaacactaggggtaatacttatagcactgcttggctttgtgctctaggaaaggttttaccttttcatagatggcacactatggttcaaacatgcacacctaatgttactatcaactgtcaagatccagctggtggtgcgcttatagctaggtgttggtaccttcatgaaggtcaccaaactgctgcatttagagacgtacttgttgttttaaataaacgaacaaattaaaatgtctgataatggaccccaatcaaaccaacgtagtgccccccgcattacatttggtggacccacagattcaactgacaataaccagaatggaggacgcaatggggcaaggccaaaacagcgccgaccccaaggtttacccaataatactgcgtcttggttcacagctctcactcagcatggcaaggaggaacttagattccctcgaggccagggcgttccaatcaacaccaatagtggtccagatgaccaaattggctactaccgaagagctacccgacgagttcgtggtggtgacggcaaaatgaaagagctcagccccagatggtacttctattacctaggaactggcccagaagcttcacttccctacggcgctaacaaagaaggcatcgtatgggttgcaactgagggagccttgaatacacccaaagaccacattggcacccgcaatcctaataacaatgctgccaccgtgctacaacttcctcaaggaacaacattgccaaaaggcttctacgcagagggaagcagaggcggcagtcaagcctcttctcgctcctcatcacgtagtcgcggtaattcaagaaattcaactcctggcagcagtaggggaaattctcctgctcgaatggctagcggaggtggtgaaactgccctcgcgctattgctgctagacagattgaaccagcttgagagcaaagtttctggtaaaggccaacaacaacaaggccaaactgtcactaagaaatctgctgctgaggcatctaaaaagcctcgccaaaaacgtactgccacaaaacagtacaacgtcactcaagcatttgggagacgtggtccagaacaaacccaaggaaatttcggggaccaagacctaatcagacaaggaactgattacaaacattggccgcaaattgcacaatttgctccaagtgcctctgcattctttggaatgtcacgcattggcatggaagtcacaccttcgggaacatggctgacttatcatggagccattaaattggatgacaaagatccacaattcaaagacaacgtcatactgctgaacaagcacattgacgcatacaaaacattcccaccaacagagcctaaaaaggacaaaaagaaaaagactgatgaagctcagcctttgccgcagagacaaaagaagcagcccactgtgactcttcttcctgcggctgacatggatgatttctccagacaacttcaaaattccatgagtggagcttctgctgattcaactcaggcataaacactcatgatgaccacacaaggcagatgggctatgtaaacgttttcgcaattccgtttacgatacatagtctactcttgtgcagaatgaattctcgtaactaaacagcacaagtaggtttagttaactttaatctcacatagcaatctttaatcaatgtgtaacattagggaggacttgaaagagccaccacattttcatcgaggccacgcggagtacgatcgagggtacagtgaataatgctagggagagctgcctatatggaagagccctaatgtgtaaaattaattttagtagtgctatccccatgtgattttaatagcttcttaggagaatgacaaaaaaaaaaaaaaaaaaaaaaaa

SEQ ID NO: 29748 - DNA, 24774 bp, SARS Coronavirus
  misc_feature 860-959, 2089-2188, 2478-2577, 2877-2976, 3576-3675, 3865-3964,4134-4233, 4563-4662, 5012-5111, 5781-5879, 7438-7537, 7837-7936,8616-8715, 12025-12124, 13984-14083, 16463-16562, 16932-17031,17381-17480, 18090-18189, 19019-19118, 19478-19577, 20357-20456,21086-21185, 21945-22044, 23174-23273, 23531: n = A,T,C or G
actttaaaatctgtgtagctgtcgctcggctgcatgcctagtgcacctacgcagtataaacaataataaattttactgtcgttgacaagaaacgagtaactcgtccctcttctgcagactgcttacggtttcgtccgtgttgcagtcgatcatcagcatacctaggtttcgtccgggtgtgaccgaaaggtaagatggagagccttgttcttggtgtcaacgagaaaacacacgtccaactcagtttgcctgtccttcaggttagagacgtgctagtgcgtggcttcggggactctgtggaagaggccctatcggaggcacgtgaacacctcaaaaatggcacttgtggtctagtagagctggaaaaaggcgtactgccccagcttgaacagccctatgtgttcattaaacgttctgatgccttaagcaccaatcacggccacaaggtcgttgagctggttgcagaaatggacggcattcagtacggtcgtagcggtataacactgggagtactcgtgccacatgtgggcgaaaccccaattgcataccgcaatgttcttcttcgtaagaacggtaataagggagccggtggtcatagctatggcatcgatctaaagtcttatgacttaggtgacgagcttggcactgatcccattgaagattatgaacaaaactggaacactaagcatggcagtggtgcactccgtgaactcactcgtgagctcaatggaggtgcagtcactcgctatgtcgacaacaatttctgtggcccagatgggtaccctcttgattgcatcaaagattttctcgcacgcgcgggcaagtcaatgtgcactctttccgaacaacttgattacatnnnnnnnnnnnnnnnnnnnnnnnnnnnnnnnnnnnnnnnnnnnnnnnnnnnnnnnnnnnnnnnnnnnnnnnnnnnnnnnnnnnnnnnnnnnnnnnnnnnntagttattgaaggacctactacatgtgggtacctacctactaatgctgtagtgaaaatgccatgtcctgcctgtcaagacccagagattggacctgagcatagtgttgcagattatcacaaccactcaaacattgaaactcgactccgcaagggaggtaggactagatgttttggaggctgtgtgtttgcctatgttggctgctataataagcgtgcctactgggttcctcgtgctagtgctgatattggctcaggccatactggcattactggtgacaatgtggagaccttgaatgaggatctccttgagatactgagtcgtgaacgtgttaacattaacattgttggcgattttcatttgaatgaagaggttgccatcattttggcatctttctctgcttctacaagtgcctttattgacactataaagagtcttgattacaagtctttcaaaaccattgttgagtcctgcggtaactataaagttaccaagggaaagcccgtaaaaggtgcttggaacattggacaacagagatcagttttaacaccactgtgtggttttccctcacaggctgctggtgttatcagatcaatttttgcgcgcacacttgatgcagcaaaccactcaattcctgatttgcaaagagcagctgtcaccatacttgatggtatttctgaacagtcattacgtcttgtcgacgccatggtttatacttcagacctgctcaccaacagtgtcattattatggcatatgtaactggtggtcttgtacaacagacttctcagtggttgtctaatcttttgggcactactgttgaaaaactcaggcctatctttgaatggattgaggcgaaacttagtgcaggagttgaatttctcaaggatgcttgggagattctcaaatttctcattacaggtgtttttgacatcgtcaagggtcaaatacaggttgcttcagataacatcaaggattgtgtaaaatgcttcattgatgttgttaacaaggcactcgaaatgtgcattgatcaagtcactatcgctggcgcaaagttgcgatcactcaacttaggtgaagtcttcatcgctcaaagcaagggactttaccgtcagtgtatacgtggcaaggannnnnnnnnnnnnnnnnnnnnnnnnnnnnnnnnnnnnnnnnnnnnnnnnnnnnnnnnnnnnnnnnnnnnnnnnnnnnnnnnnnnnnnnnnnnnnnnnnnngactttacaaccagtttctgatctccttaccaacatgggtattgatcttgatgagtggagtgtagctacattctacttatttgatgatgctggtgaagaaaacttttcatcacgtatgtattgttccttttaccctccagatgaggaagaagaggacgatgcagagtgtgaggaagaagaaattgatgaaacctgtgaacatgagtacggtacagaggatgattatcaaggtctccctctggaatttggtgcctcagctgaaacagttcgagttgaggaagaagaagagnnnnnnnnnnnnnnnnnnnnnnnnnnnnnnnnnnnnnnnnnnnnnnnnnnnnnnnnnnnnnnnnnnnnnnnnnnnnnnnnnnnnnnnnnnnnnnnnnnnnggtggtggtgtagcaggtgcactcaacaaggcaaccaatggtgccatgcaaaaggagagtgatgattacattaagctaaatggccctcttacagtaggagggtcttgtttgctttctggacataatcttgctaagaagtgtctgcatgttgttggacctaacctaaatgcaggtgaggacatccagcttcttaaggcagcatatgaaaatttcaattcacaggacatcttacttgcaccattgttgtcagcaggcatatttggtgctaaaccacttcagtctttacaagtgtgcgtgcannnnnnnnnnnnnnnnnnnnnnnnnnnnnnnnnnnnnnnnnnnnnnnnnnnnnnnnnnnnnnnnnnnnnnnnnnnnnnnnnnnnnnnnnnnnnnnnnnnntaaacaagaggagccaccaaacacagaagattccaaaactgaggagaaatctgtcgtacagaagcctgtcgatgtgaagccaaaaattaaggcctgcattgatgaggttaccacaacactggaagaaactaagtttcttaccaataagttactcttgtttgctgatatcaatggtaagctttaccatgattctcagaacatgcttagaggtgaagatatgtctttccttgagaaggatgcaccttacatggtaggtgatgttatcactagtggtgatatcacttgtgttgtaataccctccaaaaaggctggtggcactactgagatgctctcaagagctttgaagaaagtgccagttgatgagtatataaccacgtaccctggacaaggatgtgctggttatacacttgaggaagctaagactgctcttaagaaatgcaaatctgcattttatgtactaccttcagaagcacctaatgctaaggaagagattctaggaactgtatcctggaatttgagagaaatgcttgctcatgctgaagagacaagaaaattaatgcctatatgcatggatgttagagccataatggcaaccatccnnnnnnnnnnnnnnnnnnnnnnnnnnnnnnnnnnnnnnnnnnnnnnnnnnnnnnnnnnnnnnnnnnnnnnnnnnnnnnnnnnnnnnnnnnnnnnnnnnnncgtagtgtcagtatcatcaccagatgctgttactacatataatggatacctcacttcgtcatcaaagacatctgaggagcactttgtagaaacagtttctttggctggctcttacagagattggtcctattcaggacagcgtacagagttaggtgttgaatttcttaagcgtggtgacaaaattgtgtannnnnnnnnnnnnnnnnnnnnnnnnnnnnnnnnnnnnnnnnnnnnnnnnnnnnnnnnnnnnnnnnnnnnnnnnnnnnnnnnnnnnnnnnnnnnnnnnnnntggatggtgctgatgttacaaaaattaaacctcatgtaaatcatgagggtaagactttctttgtactacctagtgatgacacactacgtagtgaagctttcgagtactaccatactcttgatgagagttttcttggtaggtacatgtctgctttaaaccacacaaagaannnnnnnnnnnnnnnnnnnnnnnnnnnnnnnnnnnnnnnnnnnnnnnnnnnnnnnnnnnnnnnnnnnnnnnnnnnnnnnnnnnnnnnnnnnnnnnnnnnncgtgctggtgatgctgctaacttttgtgcactcatactcgcttacagtaataaaactgttggcgagcttggtgatgtcagagaaactatgacccatcttctacagcatgctaatttggaatctgcaaagcgagttcttaatgtggtgtgtaaacattgtggtcagaaaactactaccttaacgggtgtagaagctgtgatgtatatgggtactctatcttatgataatcttaagacaggtgtttccattccatgtgtgtgtggtcgtgatgctacacaatatctagtacaacaagagtcttcttttgttatgatgtctgcaccacctgcnnnnnnnnnnnnnnnnnnnnnnnnnnnnnnnnnnnnnnnnnnnnnnnnnnnnnnnnnnnnnnnnnnnnnnnnnnnnnnnnnnnnnnnnnnnnnnnnnnnncacattaaccaggctacaaccaagacaacgttcaaaccaaacacttggtgtttacgttgtctttggagtacaaagccagtagatacttcaaattcatttgaagttctggcagtagaagacacacaaggaatggacaatcttgcttgtgaaagtcaacaacccacctctgaagaagtagtggaaaatcctaccatacagaaggaagtcatagagtgtgacgtgaaaactaccgaagttgtaggcaatgtcatacttaaaccatcagatgaaggtgttaaagtaacacaagagttaggtcatgaggatcttatggctgcttatgtggaaaacacaagcattaccattaagannnnnnnnnnnnnnnnnnnnnnnnnnnnnnnnnnnnnnnnnnnnnnnnnnnnnnnnnnnnnnnnnnnnnnnnnnnnnnnnnnnnnnnnnnnnnnnnnnnnaattaatagtgttccttggagtaaaattttggcttatgtcaaaccattcttaggacaagcagcaattacaacatcaaattgcgctaagagattagcacaacgtgtgtttaacaattatatgccttatgtgtttacattattgttccaattgtgtacttttactaaaagtaccaattctagaattagagcttcactacctacaactattgctaaaaatagtgttaagagtgttgctaaattatgtttggatgccggcattaattatgtgaagtcacccaaattttctaaattgttcacaatcgctatgtggctattgttgttaagtatttgcttaggttctctaatctgtgtaactgctgcttttggtgtactcttatctaattttggtgctccttcttattgtaatggcgttagagaattgtatcttaattcgtctaacgttactactatggatttctgtgaaggttcttttccttgcagcatttgtttaagtggattagactcccttgattcttatccagctcttgaaaccattcaggtgacgatttcatcgtacaagctagacttgacaattttaggtctggccgctgagtgggttttggcatatatgttgttcacaaaattcttttatttattaggtctttcagctataatgcaggtgttctttggnnnnnnnnnnnnnnnnnnnnnnnnnnnnnnnnnnnnnnnnnnnnnnnnnnnnnnnnnnnnnnnnnnnnnnnnnnnnnnnnnnnnnnnnnnnnnnnnnnnncaaatggcacccgtttctgcaatggttaggatgtacatcttctttgcttctttctactacatatggaagagctatgttcatatcatggatggttgcacctcttcgacttgcatgatgtgctataagcgcaatcgtgccacacgcgttgagtgtacaactattgttaatggcatgaagagatctttctatgtctatgcaaatggaggccgtggcttctgcaagactcacaattggaattgtctcaattgtgacacattttgcactggtagtacattcattagtgatgaagttgctcgtgatttgtcactccagtttaaaagaccaatcaaccctactgaccagtcatcgtatattgttgatagtgttgctgtgaaaaatggcgcgcttcacctctactttgacaaggctggtcaaaagacctatgagagacatccgctctcccattttgtcaatttagacaatttgagagctaacaacactaaaggttcactgcctattaatgtcatagtttttgatggcaagtccaaatgcgacgagtctgcttctaagtctgcttctgtgtactacagtcagctgatgtgccaacctattctgttgcttgaccaagctcttgtatcagacgttggagatagtactgaagtttccgttaagatgtttgatgcttatgtcgacaccttttcagcaacttttagtgttcctatggaaaaacttaaggcacttgttgctacagctcacagcgagttagcaaagggtgtagctttagatggtgtcctttctacattcgtgtcagctgcccgacaaggtgttgttgataccgatgttgacacaaaggatgttattgaatgtctcaaactttcacatcactctgacttagaagtgacaggtgacagttgtaacaatttcatgctcacctataataaggttgaaaacatgacgcccagagatcttggcgcatgtattgactgtaatgcaaggcatatcaatgcccaagtagcaaaaagtcacaatgtttcactcatctggaatgtaaaagactacatgtctttatctgaacagctgcgtaaacaaattcgtagtgctgccaagaagaacaacataccttttagactaacttgtgctacaactagacaggttgtcaatgtcataactactaaaatctcactcaagggtggtaagattgttagtacttgttttaaacttatgcttaaggccacattattgtgcgttcttgctgcattggtttgttaaatcgttatgccagtacatacattgtcaatccatgatggttacacaaatgaaatcattggttacaaagccattcaggatggtgtcactcgtgacatcatttctactgatgattgttttgcaaataaacatgctggttttgacgcatggtttagccagcgtggtggttcatacaaaaatgacaaaagctgccctgtagtagctgctatcattacaagagagattggtttcatagtgcctggcttaccgggtactgtgctgagagcaatcaatggtgacttcttgcattttctacctcgtgtttttagtgctgtnnnnnnnnnnnnnnnnnnnnnnnnnnnnnnnnnnnnnnnnnnnnnnnnnnnnnnnnnnnnnnnnnnnnnnnnnnnnnnnnnnnnnnnnnnnnnnnnnnnntgggcaaacctgtgccatattgttatgacactaatttgctagagggttctatttcttatagtgagcttcgtccagacactcgttatgtgcttatggatggttccatcatacagtttcctaacacttacctggagggttctgttagagtagtaacaacttttgatgctgagtactgtagacatggtacatgcgaaaggtcagaagtaggtatttgcctatctaccagtggtagatgggttcttaataatgagcattacagagctctatcaggagttttctgtggtgttgatgcgatgaatnnnnnnnnnnnnnnnnnnnnnnnnnnnnnnnnnnnnnnnnnnnnnnnnnnnnnnnnnnnnnnnnnnnnnnnnnnnnnnnnnnnnnnnnnnnnnnnnnnnntcttgacatcactattgattcttgttcaaagtacacagtggtcactgtttttctttgtttacgagaatgctttcttgccatttactcttggtattatggcaattgctgcatgtgctatgctgcttgttaagcataagcacgcattcttgtgcttgtttctgttaccttctcttgcaacagttgcttactttaatatggtctacatgcctgctagctgggtgatgcgtatcatgacatggcttgaattggctgacactagcttgtctggttataggcttaaggattgtgttatgtatgcttcagctttagttttgcttattctcatgacagctcgcactgtttatgatgatgctgctagacgtgtttggacactgatgaatgtcattacacttgtttacaaagtctactatggtaatgctttagatcaagctatttccatgtgggccttagttatttctgtaacctctaactattctggtgtcgttacgactatcatgtttttagctagagctatagtgtttgtgtgtgttgagtattacccattgttatttattactggcaacaccttacagtgtatcatgcttgtttattgtttcttaggctattgttgctgctgctactttggccttttctgtttactcaaccgttacttcaggcttactcttggtgtttatgactannnnnnnnnnnnnnnnnnnnnnnnnnnnnnnnnnnnnnnnnnnnnnnnnnnnnnnnnnnnnnnnnnnnnnnnnnnnnnnnnnnnnnnnnnnnnnnnnnnncatgcagggtgctgtagacattaataggttgtgcgaggaaatgctcgataaccgtgctactcttcaggctattgcttcagaatttagttctttaccatcatatgccgcttatgccactgcccaggaggcctatgagcaggctgtagctaatggtgattctgaagtcgttctcaaaaagttaaagaaatctttgaatgtggctaaatctgagtttgaccgtgatgctgccatgcaacgcaagttggaaaagatggcagatcaggctatgacccaaatgtacaaacaggcaagatctgaggacaagagggcaaaagtaactagtgctatgcaaacaatgctcttcactatgcttaggaagcttgataatgatgcacttaacaacattatcaacaatgcgcgtgatggttgtgttccactcaacatcataccattgactacagcagccaaactcatggttgttgtccctgattatggtacctacaagaacacttgtgatggtaacacctttacatatgcatctgcactctgggaaatccagcaagttgttgatgcggatagcaagattgttcaacttagtgaaattaacatggacaattcaccaaatttggcttggcctcttattgttacagctctaagagccaactcagctgttaaactacagaataatgaactgagtccagtagcactacgacagatgtcctgtgcggctggtaccacacaaacagcttgtactgatgacaatgcacttgcctactataacaattcgaagggaggtaggtttgtgctggcattactatcagaccaccaagatctcaaatgggctagattccctaagagtgatggtacaggtacaatttacacagaactggaaccaccttgtaggtttgttacagacacaccaaaagggcctaaagtgaaatacttgtacttcatcaaaggcttaaacaacctaaatagaggtatggtgctgggcagtttagctgctacagtacgtcttcaggctggaaatgctacagaagtacctgccaattcaactgtgctttccttctgtgcttttgcagtagaccctgctaaagcatataaggattacctagcaagtggaggacaaccaatcaccaactgtgtgaagatgttgtgtacacacactggtacaggacaggcaattactgtaacaccagaagctaacatggaccaagagtcctttggtggtgcttcatgttgtctgtattgtagatgccacattgaccatccaaatcctaaaggattctgtgacttgaaaggtaagtacgtccaaatacctaccacttgtgctaatgacccagtgggttttacacttagaaacacagtctgtaccgtctgcggaatgtggaaaggttatggctgtagttgtgaccaactccgcgaacccttgatgcagtctgcggatgcatcaacgtttttaaacgggtttgcggtgtaagtgcagcccgtcttacaccgtgcggcacaggcactagtactgatgtcgtctacagggcttttgatatttacaacgaaaaagttgctggttttgcaaagttcctaaaaactaattgctgtcgcttccaggagaaggatgaggaaggcaatttattagactcttactttgtagttaagaggcatactatgtctaactaccaacatgaagagactatttataacttggttaaagattgtccagcggttgctgtccatgactttttcaagtttagagtagatggtgacatggtaccacatatatcacgtcagcgtctaactaaatacacaatggctgatttagtctatgctctacgtcattttgatgagggtaattgtgatacattaaaagaaatactcgtcacatacaattgctgtgatgatgattatttcaataagaaggattggtatgacttcgtagagaatcctgacatcttacgcgtatatgctaacttaggtgagcgtgtacgccaatcattattaaagactgtacaattctgcgatgctatgcgtgatgcaggcattgtaggcgtactgacattagataatcaggatcttaatgggaactggtacgatttcggtgatttcgtacaagtagcaccaggctgcggagttcctattgtggattcatattactcattgctgatgcccatcctcactttgactagggcattggctgctgagtcccatatggatgctgatctcgcaaaaccacttattaagtgggatttgctgaaatatgattttacggaagagagactttgtctcttcgaccgttattttaaatattgggaccagacataccatcccaattgtattaactgtttggatgataggtgtatccttcattgtgcaaactttaatgtgttattttctactgtgtttccacctacaagttttggaccactagtaagaaaaatatttgtagatggtgttccttttgttgtttcaactggataccattttcgtgagttaggagtcgtacataatcaggatgtaaacttacatagctcgcgtctcagtttcaaggaacttttagtgtatgctgctgatccagctatgcatgcagcttctggcaatttattgctagataaacgcactacatgcttttcagtagctgcactaacaaacaatgttgcttttcaaactgtcaaacccggtaattttaataaagacttttatgactttgctgtgtctaaaggtttctttaaggaaggaagttctgttgaactaaaacacttcttctttgctcaggatggcaacgctgctatcagtgattatgactattatcgttataatctgccaacaatgtgtgatatcagacaactcctattcgtagttgaagttgttgataaatactttgattgttacgatggtggctgtattaatgccaaccaagtaatcgttaacaatctggataaatcagctggtttcccatttaataaatggggtaaggctagactttattatgactcaatgagttatgaggatcaagatgcacttttcgcgtatactaagcgtaatgtcatccctactataactcaaatgaatcttaagtatgccattagtgcaaagaatagagctcgcaccgtagctggtgtctctatctgtagtactatgacaaatagacagtttcatcagaaattattgaagtcaatagccgccactagaggagctactgtggtaattggaacaagcaagttttacggtggctggcataatatgttaaaaactgtttacagtgatgtagaaactccacaccttatgggttgggattatccaaaatgtgacagagccatgcctaacatgcttaggnnnnnnnnnnnnnnnnnnnnnnnnnnnnnnnnnnnnnnnnnnnnnnnnnnnnnnnnnnnnnnnnnnnnnnnnnnnnnnnnnnnnnnnnnnnnnnnnnnnnattacgtgtacctgccttacccagatccatcaagaatattaggcgcaggctgttttgtcgatgatattgtcaaaacagatggtacacttatgattgaaaggttcgtgtcactggctattgatgcttacccacttacaaaacatcctaatcaggagtatgctgatgtctttcacttgtatttacaatacattagaaagttacatgatgagcttactggccacatgttggacatgtattccgtaatgctaactaatgataacacctcacggtactgggaacctgagttttatgaggctatgtacacaccacatacagtcttgcaggctgtaggtgcttgtgtattgtgcaattcacagacttcacttcgttgcggtgcctgtattaggagaccattcctatgttgcaagtgctgctatgaccatgtcatttcaacatcacacaaattagtgttgtctgttaatccctatgtttgcaatgccccaggttgtgatgtcactgatgtgacacaactgtatctaggaggtatgagctattattgcaagtcacataagcctcccattagttttccattatgtgctaatggtcaggtttttggtttatacaaaaacacatgtgtaggcagtgacaatgtcactgacttcaatgcgatagcaacatgtgattggactaatgctggcgattacatacttgccaacacttgtactgagagactcaagcttttcgcagcagaaacgctcaaagccactgaggaaacatttaagctgtcatatggtattgccactgtacgcgaagtactctctgacagagaattgcatctttcatgggaggttggaaaacctagaccaccattgaacagaaactatgtctttactggttaccgtgtaactaaaaatagtaaagtacagattggagagtacacctttgaaaaaggtgactatggtgatgctgttgtgtacagaggtactacgacatacaagttgaatgttggtgattactttgtgttgacatctcacactgtaatgccacttagtgcacctactctagtgccacaagagcactatgtgagaattactggcttgtacccaacactcaacatctcagatgagttttctagcaatgttgcaaattatcaaaaggtcggcatgcaaaagtactctacactccaaggaccacctggtactggtaagagtcattttgccatcggacttgctctctattacccatctgctcgcatagtgtatacggcatgctctcatgcagctgttgatgccctatgtgaaaaggcattaaaatatttgcccatagataaatgtagtagaatcatacctgcgcgtgcgcgcgtagagtgttttgataaattcaaagtgaattcaacactagaacagtatgttttctgcactgtaaatgcattgccagaaacaactgctgacattgtagtctttgatgaaatctctatggctactaattatgacttgagtgttgtcaatgctagacttcgtgcaaaacactacgtctatattggcgatcctgctcaattaccagccccccgcacattgctgactaaaggcacactagaaccagaatattttaattcagtgtgcagacttatgaaaacaataggtccagacatgttccttggaacttgtcgccgttgtcctgctgaaattgttgacactgtgagtgctttagtttatgacaataagctaaaagcacacaaggagaagtcagctcaatgcttcaaaatgttctacaaaggtgttattacacatgatgtttcatctgcaatcaacagacctcaaataggcgttgtaagagaatttcttacacgcaatcctgcttggagaaaagctgtttttatcnnnnnnnnnnnnnnnnnnnnnnnnnnnnnnnnnnnnnnnnnnnnnnnnnnnnnnnnnnnnnnnnnnnnnnnnnnnnnnnnnnnnnnnnnnnnnnnnnnnnctctatgatgggtttcaaaatgaattaccaagtcaatggttaccctaatatgtttatcacccgcgaagaagctattcgtcacgttcgtgcgtggattggctttgatgtagagggctgtcatgcaactagagatgctgtgggtactaacctacctctccagctaggattttctacaggtgttaacttagtagctgtaccgactggttatgttgacactgaaaataacacagaattcaccagagttaatgcaaaacctccaccaggtgaccagtttaaacatcttataccactcatgtataaaggcttgccctggaatgtagtgcgtattaagatagtacaaatgctcagtgatacactgaaaggattgtcagacagagtcgtgttcgtcctttgggcgcatggctttgagcttacatcaatgaagtactttgtcaagattggacctgaaagaacgtgttgtctgtgtgacaaacgtgcaacttgcttttctacttcatcagatacttatgcctgctggaatcattctgtgggttttgactatgtctataacccatttatgattgatgttcagcagtggggctttacgggtaaccttcagagtaaccatgaccaacattgccaggtacatggaaatgcacatgtggctagttgtgatgctatcatgactagatgtttagcagtccatgagtgctttgttaagcgcgttgattggtctgttgaataccctattataggagatgaactgagggttaattctgcttgcagaaaagtacaacacatggttgtgaagtctgcattgcttgctgataagtttccagttcttcatgacattggaaatccaaaggctatcaagtgtgtgcctcaggctgaagtagaatggaagttctacgatgctcagccatgtagtgacaaagcttacaaaatagaggaactcttctattcttatgctacacatcacgataaattcactgatggtgtttgtttgttttggaattgtaacgttgatcgttacccagccaatgcaattgtgtgtaggtttgacacaagagtcttgtcaaacttgaacttaccaggctgtgatggtggtagtttgtatgtgaataagcatgcattccacactccagctttcgataaaagtgcatttactaatttaaagcaattgcctttcttttactattctgatagtccttgtgagtctcatggcaaacaagtagtgtcggatattgattatgttccactcaaatctgctacgtgtattacacgatgcaatttaggtggtgctgtttgcagacaccatgcaaatgagtaccgacagtacttggatgcatataatatgatgatttctgctggatttagcctatggatttacaaacaatttgatacttataacctgtggaatacatttaccaggttacagagtttagaaaatgtggcttataatgttgttaataaaggacactttgatggacacgccggcgaagcacctgtttccatcattaataatgctgtttacacaaaggtagatggtattgatgtggagatctttgaaaataagacaacacttcctgttaatgttgcatttgagctttgggctaagcgtaacattaaaccagtgccagagattaagatactcaataatttgggtgttgatatcgctgctaatactgtaatctgggactacaaaagagaagccccagcacatgtgtctacaataggtgtctgcacaatgactgacattgccaagaaacctactgagagtgcttgttcttcacttactgtcttgtttgatggtagagtggaaggacaggtagacctttttagaaacgcccgtaatggtgttttaataacagaaggttcagtcaaaggtctaacaccttcaaagggaccagcacaagctagcgtcaatggagtcacattaattggagaatcagtaaaaacacagtttaactactttaagaaagtagacggcattattcaacagttgcctgaaacctactttactcagagcagagacttagaggattttaagcccagatcacaaatggaaactgactttctcgagctcgctatggatgaattcatacagcgatataagctcgagggctatgccttcgaacacatcgtttatggagatttcagtcatggacaacttggcggtcttcatttaatgataggcttagccaagcgctcacaagattcaccacttaaattagaggattttatccctatggacagcacagtgaaaaattacttcataacagatgcgcaaacaggttcatcaaaatgtgtgtgttctgtgattgatcttttacttgatgactttgtcgagataataaagtcacaagatttgtcagtgatttcaaaagtggtcaaggttacnnnnnnnnnnnnnnnnnnnnnnnnnnnnnnnnnnnnnnnnnnnnnnnnnnnnnnnnnnnnnnnnnnnnnnnnnnnnnnnnnnnnnnnnnnnnnnnnnnnngcaacagtacatacggctaataaatgggaccttattattagcgatatgtatgaccctaggaccaaacatgtgacaaaagagaatgactctaaagaagggtttttcacttatctgtgtggatttataaagcaaaaactagccctgggtggttctatagctgtaaagataacagagcattcttggaatgctgacctttacaagcttatgggccatttctcatggtggacagcttttgttacaaatgtaaatgcatcatcatcggaagcatttttaattggggctaactatcttggcaagccgaaggaacaaattgatggctataccatgcatgctaactacattttctggaggaacacaaatcctatccagnnnnnnnnnnnnnnnnnnnnnnnnnnnnnnnnnnnnnnnnnnnnnnnnnnnnnnnnnnnnnnnnnnnnnnnnnnnnnnnnnnnnnnnnnnnnnnnnnnnntcaaatgttgtccgtggttgggtttttggttctaccatgaacaacaagtcacagtcggtgattattattaacaattctactaatgttgttatacgagcatgtaactttgaattgtgtgacaaccctttctttgctgtttctaaacccatgggtacacagacacatactatgatattcgataatgcatttaattgcactttcgagtacatatctgatgccttttcgcttgatgtttcagaaaagtcaggtaattttaaacacttacgagagtttgtgtttaaaaataaagatgggtttctctatgtttataagggctatcaacctatagatgtagttcgtgatctaccttnnnnnnnnnnnnnnnnnnnnnnnnnnnnnnnnnnnnnnnnnnnnnnnnnnnnnnnnnnnnnnnnnnnnnnnnnnnnnnnnnnnnnnnnnnnnnnnnnnnntagagccattcttacagccttttcacctgctcaagacacttggggcacgtcagctgcagcctattttgttggctatttaaagccaactacatttatgctcaagtatgatgaaaatggtacaatcacagatgctgttgattgttctcaaaatccacttgctgaactcaaatgctctgttaagagctttgagattgacaaaggaatttaccagacctctaatttcagggttgttccctcaggagatgttgtgagattccctaatattacaaacttgtgtccttttggagaggtttttaatgctactaaattcccttctgtctatgcatgggagagaaaaaaaatttctaattgtgttgctgattactctgtgctctacaactcaacatttttttcaacctttaagtgctatggcgtttctgccactaagttgaatgatctttgcttctccaatgtctatgcagattcttttgtagtcaagggagatgatgtaagacaaatagcgccaggacaaactggtgttattgctgattataattataaattgccagatgatttcatgggttgtgtccttgcttggaatactaggaacattgatgctacttcaactggnnnnnnnnnnnnnnnnnnnnnnnnnnnnnnnnnnnnnnnnnnnnnnnnnnnnnnnnnnnnnnnnnnnnnnnnnnnnnnnnnnnnnnnnnnnnnnnnnnnntcttaattgttattggccattaaatgattatggtttttacaccactactggcattggctaccaaccttacagagttgtagtactttcttttgaacttttaaatgcaccggccacggtttgtggaccaaaattatccactgaccttattaagaaccagtgtgtcaattttaattttaatggactcactggtactggtgtgttaactccttcttcaaagagatttcaaccatttcaacaatttggccgtgatgtttctgatttcactgattccgttcgagatcctaaaacatctgaaatattagacatttcaccttgctcttttgggggtgtaagtgtaattacacctggaacaaatgcttcatctgaagttgctgttctatatcaagatgttaactgcactgatgtttctacagcaattcatgcagatcaactcacaccagcttggcgcatatattctactggaaacaatgtattccagactcaagcaggctgtcttataggagctgagcatgtcgacacttcttatgagtgcgacattcctattggagctggcatttgtgctagttaccatacagtttctttattacgtagtactagccaaaaatctattgtggcttatactatgtctttaggtgctgatagttcaattgcttactctaataacaccattgctatacctactaacttttcaattagcattactacagaagtaatgcctgtttctatggctaaaacctccgtagattgtaatatgtacatctgcggagattctactgaatgtgctaatttgcttctccaatatggtagcttttgcacacaactaaatcgtnnnnnnnnnnnnnnnnnnnnnnnnnnnnnnnnnnnnnnnnnnnnnnnnnnnnnnnnnnnnnnnnnnnnnnnnnnnnnnnnnnnnnnnnnnnnnnnnnnnntcacaaatattacctgaccctctaaagccaactaagaggtcttttattgaggacttgctctttaataaggtgacactcgctgatgctggcttcatgaagcaatatggcgaatgcctaggtgatattaatgctagagatctcatttgtgcgcagaagttcaatggacttacagtgttgccacctctgctcactgatgatatgattgctgcctacactgctgctctagttagtggtactgccactgctggatggacatttggtgctggcgctgctcttcaaataccttttgctatgcaaatggcatataggttcaatggcattggagttacccaaaatgttctctatgagaaccaaaaacannnnnnnnnnnnnnnnnnnnnnnnnnnnnnnnnnnnnnnnnnnnnnnnnnnnnnnnnnnnnnnnnnnnnnnnnnnnnnnnnnnnnnnnnnnnnnnnnnnngttcttggacaatcaaaaagagttgacttttgtggaaagggctaccaccttatgtccttcccacaagcagccccgcatggtgttgtcttcctacatgtcacgtatgtgccatcccaggagaggaacttcaccacagcgccagcaatttgtcatgaaggcaaagcatacttccctcgtgaaggtgtttttgtgtttaatggcacttcttggtttattacacagaggaacttcttttctccacaaataattactacagacaatacatttgtctcaggaaattgtgatgtcgttattggcatcattaacaacacagtttatgatcctctgcaacctgagcttgactcattcaaagaagagctggacaagtacttcaaaaatcatacatcaccagatgttgatcttggcgacatttcaggcattaacgcttctgtcgtcaacattcaaaaagaaattgaccgcctcaatgaggtcgctaaaaatttaaatgaatcactcattgaccttcaagaattgggaaaatatgagcaatatattaaatggccttggtatgtttggctcggcttcattgctggactaattgccatcgtcatggttacaatcttgctttgttgcatgactagttgttgcagttgcctcaagggtgcatgctcttgtggttcttgctgcaagtttgatgaggatgactctgagccagttctcaagggtgtcaaattacattacacataaacgaacttatggatttgtttatgagattttttactcttggatcaattactgcannnnnnnnnnnnnnnnnnnnnnnnnnnnnnnnnnnnnnnnnnnnnnnnnnnnnnnnnnnnnnnnnnnnnnnnnnnnnnnnnnnnnnnnnnnnnnnnnnnnctcactccctttcggatggcttgttattggcgttgcatttcttgctgtttttcagagcgctaccaataataattgcgctcaataaaagatggcagctagccctttataagggcttccagttcatttgcaatttactgctgctatttgttaccatctattcacatcttttgcttgtcgctgcaggtatggaggcgcaatttttgtacctctatgccttgatatattttctacaatgcatcaacgcatgtagaattattatgagatgttggctttgttggaagtgcaaatccaagaacccattactttatgatgccaactactttgtttgctggcacacacataactatgactactgtataccatataacagtgtcacagatacaattgtcgttactgaaggtgacggcatttcaacaccaaaactcaaagaagactaccaaattggtggttattctgaggataggcactcaggtgttaaagactatgtcgttgtacatggctatttcaccgaagtttactaccagcttgagtctacacaaattactacagacactggtattgaaaatgctacattcttcatctttaacaagcttgttaaagacccaccgaatgtgcaaatacacacaatcnnnnnnnnnnnnnnnnnnnnnnnnnnnnnnnnnnnnnnnnnnnnnnnnnnnnnnnnnnnnnnnnnnnnnnnnnnnnnnnnnnnnnnnnnnnnnnnnnnnnatagttaatagcgtacttctttttcttgctttcgtggtattcttgctagtcacactagccatccttactgcgcttcgattgtgtgcgtactgctgcaatattgttaacgtgagtttagtaaaaccaacggtttacgtctactcgcgtgttaaaaatctgaactcttctgaaggagttcctgatcttctggtctaaacgaactaactattattattattctgtttggaactttaacattgcttatcatggcagacaacggtactattaccgttgaggagcttaaacaactcctggaacaatggaacctagtaataggtttcctattcctagcctggattatgttactacaatttgcctattctaatcggaacaggtttttgtacataataaagcttgttttcctctggctcttgtggccagtaacacttgcttgttttgtgcttgctgctgtctacagaattaattgggtgactggcgggattgcgattgcaatggcttgtattgtaggcttgatgtggcttagctacttcgttgcttccttcaggctgtttgctcgtacccgctcaatgtggtcattcaacccagaaacaaacattcttctcaatgtgcctctccgggggacaattgtgaccagaccgctcatggaaagtgaacttgtcattggtgctgtgatcattcgtggtcacttgcgaatggccggacactccctagggcgctgtgacattaaggacctgccaaaagagatcactgtggctacatnnnnnnnnnnnnnnnnnnnnnnnnnnnnnnnnnnnnnnnnnnnnnnnnnnnnnnnnnnnnnnnnnnnnnnnnnnnnnnnnnnnnnnnnnnnnnnnnnnnngtattggaaactataaattaaatacagaccacgccggtagcaacgacaatattgctttgctagtacagtaagtgacaacagatgtttcatcttgttgacttccaggttacaatagcagagatattgattatcattatgaggactttcaggattgctatttggaatcttgacgttataataagttcaatagtgagacaattatttaagcctctaactaagaagaattattcggagttagatgatgaagaacttatggagttagattatccataaaacgaacatgaaaattattctcttcctgacattgattgtatttacatcttgcgagctatatcactatcaggagtgtgttagaggtacgactgtactactaaaagaaccttgcccatcaggaacatacgagggcaattcaccatttcaccctcttgctgacaataaatttgcactaacttgcactagcacacactttgcttttgcttgtgctgacggtactcgacatacctatcagctgcgtgcaagatcagtttcaccaaaacttttcatcagacaagaggaggttcaacaagagctctactcgccactttttctcattgttgctgctctagtatttttaatactttgcttcaccattaagagaaagacagaatgaatgagctcactttaattgacttctatttgtgctttttagcctttctgctattccttgttttaataatgcttattatattttggttttcactcgaaatccaggatctagaagaaccttgtaccaaagtctaaacgaacatgaaacttctcattgttttgacttgtatttctctatgcagttgcatacgcactgtagtacagcgctgtgcatctaataaacctcatgtgcttgaagatccttgtaaggtacaacactaggggtaatacttatagcactgcttggctttgtgctctaggaaaggttttaccttttcatagatggcacactatggttcaaacatgcacacctaatgttactatcaactgtcaagatccagctggtggtgcgcttatagctaggtgttggtaccttcatgaaggtcaccaaactgctgcatttagagacgtacttgttgttttaaataaacgaacaaattaaaatnnnnnnnnnnnnnnnnnnnnnnnnnnnnnnnnnnnnnnnnnnnnnnnnnnnnnnnnnnnnnnnnnnnnnnnnnnnnnnnnnnnnnnnnnnnnnnnnnnnngcattacatttggtggacccacagattcaactgacaataaccagaatggaggacgcaatggggcaaggccaaaacagcgccgaccccaaggtttacccaataatactgcgtcttggttcacagctctcactcagcatggcaaggaggaacttagattccctcgaggccagggcgttccaatcaacaccaatagtggtccagatgaccaaattggctactaccgaagagctacccgacgagttcgtggtggtgacggcnaaatgaaagagctcagccccagatggtacttctattacctaggaactggcccagaagcttcacttccctacggcgctnacaaagaaggcatcgtatgggttgcaactgagggagccttgaatacacccaaagaccacattggcacccgcaatcctaataacaatgctgccaccgtgctacaacttcctcaaggaacaacattgccaaaaggcttctacgcagagggaagcagaggcggcagtcaagcctcttctcgctcctcatcacgtagtcgcggtaattcaagaaattcaactcctggcagcagtaggggaaattctcctgctcgaatggctagcggaggtggtgaaactgccctcgcgctattgctgctagacagattgaaccagcttgagagcaaagtttctggtaaaggccaacaacaacaaggccaaactgtcactaagaaatctgctgctgaggcatctaaaaagcctcgccaaaaacgtactgccacaaaacagtacaacgtcactcaagcatttgggagacgtggtccagaacaaacccaaggaaatttcggggaccaagacctaatcagacaaggaactgattacaaacattggccgcaaattgcacaatttgctccaagtgcctctgcattctttggaatgtcacgcattggcatggaagtcacaccttcgggaacatggctgacttatcatggagccattaaattggatgacaaagatccacaattcaaagacaacgtcatactgctgaacaagcacattgacgcatacaaaacattcccaccaacagagcctaaaaaggacaaaaagaaaaagactgatgaagctcagcctttgccgcagagacaaaagaagcagcccactgtgactcttcttcctgcggctgacatggatgatttctccagacaacttcaaaattccatgagtggagcttctgctgattcaactcaggcataaacactcatgatgaccacacaaggcagatgggctatgtaaacgttttcgcaattccgtttacgatacatagtctactcttgtgcagaatgaattctcgtaactaaacagcacaagtaggtttagttaactttaatctcacatagcaatctttaatcaatgtgtaacattagggaggacttgaaagagccaccacattttcatcgaggccacgcggagtacgatcgagggtacagtgaataatgctagggagagctgcctatatggaagagccct

SEQ ID NO: 29749 - DNA, 29736 bp, SARS Coronavirus
ctacccaggaaaagccaaccaacctcgatctcttgtagatctgttctctaaacgaactttaaaatctgtgtagctgtcgctcggctgcatgcctagtgcacctacgcagtataaacaataataaattttactgtcgttgacaagaaacgagtaactcgtccctcttctgcagactgcttacggtttcgtccgtgttgcagtcgatcatcagcatacctaggtttcgtccgggtgtgaccgaaaggtaagatggagagccttgttcttggtgtcaacgagaaaacacacgtccaactcagtttgcctgtccttcaggttagagacgtgctagtgcgtggcttcggggactctgtggaagaggccctatcggaggcacgtgaacacctcaaaaatggcacttgtggtctagtagagctggaaaaaggcgtactgccccagcttgaacagccctatgtgttcattaaacgttctgatgccttaagcaccaatcacggccacaaggtcgttgagctggttgcagaaatggacggcattcagtacggtcgtagcggtataacactgggagtactcgtgccacatgtgggcgaaaccccaattgcataccgcaatgttcttcttcgtaagaacggtaataagggagccggtggtcatagctatggcatcgatctaaagtcttatgacttaggtgacgagcttggcactgatcccattgaagattatgaacaaaactggaacactaagcatggcagtggtgcactccgtgaactcactcgtgagctcaatggaggtgcagtcactcgctatgtcgacaacaatttctgtggcccagatgggtaccctcttgattgcatcaaagattttctcgcacgcgcgggcaagtcaatgtgcactctttccgaacaacttgattacatcgagtcgaagagaggtgtctactgctgccgtgaccatgagcatgaaattgcctggttcactgagcgctctgataagagctacgagcaccagacacccttcgaaattaagagtgccaagaaatttgacactttcaaaggggaatgcccaaagtttgtgtttcctcttaactcaaaagtcaaagtcattcaaccacgtgttgaaaagaaaaagactgagggtttcatggggcgtatacgctctgtgtaccctgttgcatctccacaggagtgtaacaatatgcacttgtctaccttgatgaaatgtaatcattgcgatgaagtttcatggcagacgtgcgactttctgaaagccacttgtgaacattgtggcactgaaaatttagttattgaaggacctactacatgtgggtacctacctactaatgctgtagtgaaaatgccatgtcctgcctgtcaagacccagagattggacctgagcatagtgttgcagattatcacaaccactcaaacattgaaactcgactccgcaagggaggtaggactagatgttttggaggctgtgtgtttgcctatgttggctgctataataagcgtgcctactgggttcctcgtgctagtgctgatattggctcaggccatactggcattactggtgacaatgtggagaccttgaatgaggatctccttgagatactgagtcgtgaacgtgttaacattaacattgttggcgattttcatttgaatgaagaggttgccatcattttggcatctttctctgcttctacaagtgcctttattgacactataaagagtcttgattacaagtctttcaaaaccattgttgagtcctgcggtaactataaagttaccaagggaaagcccgtaaaaggtgcttggaacattggacaacagagatcagttttaacaccactgtgtggttttccctcacaggctgctggtgttatcagatcaatttttgcgcgcacacttgatgcagcaaaccactcaattcctgatttgcaaagagcagctgtcaccatacttgatggtatttctgaacagtcattacgtcttgtcgacgccatggtttatacttcagacctgctcaccaacagtgtcattattatggcatatgtaactggtggtcttgtacaacagacttctcagtggttgtctaatcttttgggcactactgttgaaaaactcaggcctatctttgaatggattgaggcgaaacttagtgcaggagttgaatttctcaaggatgcttgggagattctcaaatttctcattacaggtgtttttgacatcgtcaagggtcaaatacaggttgcttcagataacatcaaggattgtgtaaaatgcttcattgatgttgttaacaaggcactcgaaatgtgcattgatcaagtcactatcgctggcgcaaagttgcgatcactcaacttaggtgaagtcttcatcgctcaaagcaagggactttaccgtcagtgtatacgtggcaaggagcagctgcaactactcatgcctcttaaggcaccaaaagaagtaacctttcttgaaggtgattcacatgacacagtacttacctctgaggaggttgttctcaagaacggtgaactcgaagcactcgagacgcccgttgatagcttcacaaatggagctatcgttggcacaccagtctgtgtaaatggcctcatgctcttagagattaaggacaaagaacaatactgcgcattgtctcctggtttactggctacaaacaatgtctttcgcttaaaagggggtgcaccaattaaaggtgtaacctttggagaagatactgtttgggaagttcaaggttacaagaatgtgagaatcacatttgagcttgatgaacgtgttgacaaagtgcttaatgaaaagtgctctgtctacactgttgaatccggtaccgaagttactgagtttgcatgtgttgtagcagaggctgttgtgaagactttacaaccagtttctgatctccttaccaacatgggtattgatcttgatgagtggagtgtagctacattctacttatttgatgatgctggtgaagaaaacttttcatcacgtatgtattgttccttttaccctccagatgaggaagaagaggacgatgcagagtgtgaggaagaagaaattgatgaaacctgtgaacatgagtacggtacagaggatgattatcaaggtctccctctggaatttggtgcctcagctgaaacagttcgagttgaggaagaagaagaggaagactggctggatgatactactgagcaatcagagattgagccagaaccagaacctacacctgaagaaccagttaatcagtttactggttatttaaaacttactgacaatgttgccattaaatgtgttgacatcgttaaggaggcacaaagtgctaatcctatggtgattgtaaatgctgctaacatacacctgaaacatggtggtggtgtagcaggtgcactcaacaaggcaaccaatggtgccatgcaaaaggagagtgatgattacattaagctaaatggccctcttacagtaggagggtcttgtttgctttctggacataatcttgctaagaagtgtctgcatgttgttggacctaacctaaatgcaggtgaggacatccagcttcttaaggcagcatatgaaaatttcaattcacaggacatcttacttgcaccattgttgtcagcaggcatatttggtgctaaaccacttcagtctttacaagtgtgcgtgcagacggttcgtacacaggtttatattgcagtcaatgacaaagctctttatgagcaggttgtcatggattatcttgataacctgaagcctagagtggaagcacctaaacaagaggagccaccaaacacagaagattccaaaactgaggagaaatctgtcgtacagaagcctgtcgatgtgaagccaaaaattaaggcctgcattgatgaggttaccacaacactggaagaaactaagtttcttaccaataagttactcttgtttgctgatatcaatggtaagctttaccatgattctcagaacatgcttagaggtgaagatatgtctttccttgagaaggatgcaccttacatggtaggtgatgttatcactagtggtgatatcacttgtgttgtaataccctccaaaaaggctggtggcactactgagatgctctcaagagctttgaagaaagtgccagttgatgagtatataaccacgtaccctggacaaggatgtgctggttatacacttgaggaagctaagactgctcttaagaaatgcaaatctgcattttatgtactaccttcagaagcacctaatgctaaggaagagattctaggaactgtatcctggaatttgagagaaatgcttgctcatgctgaagagacaagaaaattaatgcctatatgcatggatgttagagccataatggcaaccatccaacgtaagtataaaggaattaaaattcaagagggcatcgttgactatggtgtccgattcttcttttatactagtaaagagcctgtagcttctattattacgaagctgaactctctaaatgagccgcttgtcacaatgccaattggttatgtgacacatggttttaatcttgaagaggctgcgcgctgtatgcgttctcttaaagctcctgccgtagtgtcagtatcatcaccagatgctgttactacatataatggatacctcacttcgtcatcaaagacatctgaggagcactttgtagaaacagtttctttggctggctcttacagagattggtcctattcaggacagcgtacagagttaggtgttgaatttcttaagcgtggtgacaaaattgtgtaccacactctggagagccccgtcgagtttcatcttgacggtgaggttctttcacttgacaaactaaagagtctcttatccctgcgggaggttaagactataaaagtgttcacaactgtggacaacactaatctccacacacagcttgtggatatgtctatgacatatggacagcagtttggtccaacatacttggatggtgctgatgttacaaaaattaaacctcatgtaaatcatgagggtaagactttctttgtactacctagtgatgacacactacgtagtgaagctttcgagtactaccatactcttgatgagagttttcttggtaggtacatgtctgctttaaaccacacaaagaaatggaaatttcctcaagttggtggtttaacttcaattaaatgggctgataacaattgttatttgtctagtgttttattagcacttcaacagcttgaagtcaaattcaatgcaccagcacttcaagaggcttattatagagcccgtgctggtgatgctgctaacttttgtgcactcatactcgcttacagtaataaaactgttggcgagcttggtgatgtcagagaaactatgacccatcttctacagcatgctaatttggaatctgcaaagcgagttcttaatgtggtgtgtaaacattgtggtcagaaaactactaccttaacgggtgtagaagctgtgatgtatatgggtactctatcttatgataatcttaagacaggtgtttccattccatgtgtgtgtggtcgtgatgctacacaatatctagtacaacaagagtcttcttttgttatgatgtctgcaccacctgctgagtataaattacagcaaggtacattcttatgtgcgaatgagtacactggtaactatcagtgtggtcattacactcatataactgctaaggagaccctctatcgtattgacggagctcaccttacaaagatgtcagagtacaaaggaccagtgactgatgttttctacaaggaaacatcttacactacaaccatcaagcctgtgtcgtataaactcgatggagttacttacacagagattgaaccaaaattggatgggtattataaaaaggataatgcttactatacagagcagcctatagaccttgtaccaactcaaccattaccaaatgcgagttttgataatttcaaactcacatgttctaacacaaaatttgctgatgatttaaatcaaatgacaggcttcacaaagccagcttcacgagagctatctgtcacattcttcccagacttgaatggcgatgtagtggctattgactatagacactattcagcgagtttcaagaaaggtgctaaattactgcataagccaattgtttggcacattaaccaggctacaaccaagacaacgttcaaaccaaacacttggtgtttacgttgtctttggagtacaaagccagtagatacttcaaattcatttgaagttctggcagtagaagacacacaaggaatggacaatcttgcttgtgaaagtcaacaacccacctctgaagaagtagtggaaaatcctaccatacagaaggaagtcatagagtgtgacgtgaaaactaccgaagttgtaggcaatgtcatacttaaaccatcagatgaaggtgttaaagtaacacaagagttaggtcatgaggatcttatggctgcttatgtggaaaacacaagcattaccattaagaaacctaatgagctttcactagccttaggtttaaaaacaattgccactcatggtattgctgcaattaatagtgttccttggagtaaaattttggcttatgtcaaaccattcttaggacaagcagcaattacaacatcaaattgcgctaagagattagcacaacgtgtgtttaacaattatatgccttatgtgtttacattattgttccaattgtgtacttttactaaaagtaccaattctagaattagagcttcactacctacaactattgctaaaaatagtgttaagagtgttgctaaattatgtttggatgccggcattaattatgtgaagtcacccaaattttctaaattgttcacaatcgctatgtggctattgttgttaagtatttgcttaggttctctaatctgtgtaactgctgcttttggtgtactcttatctaattttggtgctccttcttattgtaatggcgttagagaattgtatcttaattcgtctaacgttactactatggatttctgtgaaggttcttttccttgcagcatttgtttaagtggattagactcccttgattcttatccagctcttgaaaccattcaggtgacgatttcatcgtacaagctagacttgacaattttaggtctggccgctgagtgggttttggcatatatgttgttcacaaaattcttttatttattaggtctttcagctataatgcaggtgttctttggctattttgctagtcatttcatcagcaattcttggctcatgtggtttatcattagtattgtacaaatggcacccgtttctgcaatggttaggatgtacatcttctttgcttctttctactacatatggaagagctatgttcatatcatggatggttgcacctcttcgacttgcatgatgtgctataagcgcaatcgtgccacacgcgttgagtgtacaactattgttaatggcatgaagagatctttctatgtctatgcaaatggaggccgtggcttctgcaagactcacaattggaattgtctcaattgtgacacattttgcactggtagtacattcattagtgatgaagttgctcgtgatttgtcactccagtttaaaagaccaatcaaccctactgaccagtcatcgtatattgttgatagtgttgctgtgaaaaatggcgcgcttcacctctactttgacaaggctggtcaaaagacctatgagagacatccgctctcccattttgtcaatttagacaatttgagagctaacaacactaaaggttcactgcctattaatgtcatagtttttgatggcaagtccaaatgcgacgagtctgcttctaagtctgcttctgtgtactacagtcagctgatgtgccaacctattctgttgcttgaccaagctcttgtatcagacgttggagatagtactgaagtttccgttaagatgtttgatgcttatgtcgacaccttttcagcaacttttagtgttcctatggaaaaacttaaggcacttgttgctacagctcacagcgagttagcaaagggtgtagctttagatggtgtcctttctacattcgtgtcagctgcccgacaaggtgttgttgataccgatgttgacacaaaggatgttattgaatgtctcaaactttcacatcactctgacttagaagtgacaggtgacagttgtaacaatttcatgctcacctataataaggttgaaaacatgacgcccagagatcttggcgcatgtattgactgtaatgcaaggcatatcaatgcccaagtagcaaaaagtcacaatgtttcactcatctggaatgtaaaagactacatgtctttatctgaacagctgcgtaaacaaattcgtagtgctgccaagaagaacaacataccttttagactaacttgtgctacaactagacaggttgtcaatgtcataactactaaaatctcactcaagggtggtaagattgttagtacttgttttaaacttatgcttaaggccacattattgtgcgttcttgctgcattggtttgttatatcgttatgccagtacatacattgtcaatccatgatggttacacaaatgaaatcattggttacaaagccattcaggatggtgtcactcgtgacatcatttctactgatgattgttttgcaaataaacatgctggttttgacgcatggtttagccagcgtggtggttcatacaaaaatgacaaaagctgccctgtagtagctgctatcattacaagagagattggtttcatagtgcctggcttaccgggtactgtgctgagagcaatcaatggtgacttcttgcattttctacctcgtgtttttagtgctgttggcaacatttgctacacaccttccaaactcattgagtatagtgattttgctacctctgcttgcgttcttgctgctgagtgtacaatttttaaggatgctatgggcaaacctgtgccatattgttatgacactaatttgctagagggttctatttcttatagtgagcttcgtccagacactcgttatgtgcttatggatggttccatcatacagtttcctaacacttacctggagggttctgttagagtagtaacaacttttgatgctgagtactgtagacatggtacatgcgaaaggtcagaagtaggtatttgcctatctaccagtggtagatgggttcttaataatgagcattacagagctctatcaggagttttctgtggtgttgatgcgatgaatctcatagctaacatctttactcctcttgtgcaacctgtgggtgctttagatgtgtctgcttcagtagtggctggtggtattattgccatattggtgacttgtgctgcctactactttatgaaattcagacgtgtttttggtgagtacaaccatgttgttgctgctaatgcacttttgtttttgatgtctttcactatactctgtctggtaccagcttacagctttctgccgggagtctactcagtcttttacttgtacttgacattctatttcaccaatgatgtttcattcttggctcaccttcaatggtttgccatgttttctcctattgtgcctttttggataacagcaatctatgtattctgtatttctctgaagcactgccattggttctttaacaactatcttaggaaaagagtcatgtttaatggagttacatttagtaccttcgaggaggctgctttgtgtacctttttgctcaacaaggaaatgtacctaaaattgcgtagcgagacactgttgccacttacacagtataacaggtatcttgctctatataacaagtacaagtatttcagtggagccttagatactaccagctatcgtgaagcagcttgctgccacttagcaaaggctctaaatgactttagcaactcaggtgctgatgttctctaccaaccaccacagacatcaatcacttctgctgttctgcagagtggttttaggaaaatggcattcccgtcaggcaaagttgaagggtgcatggtacaagtaacctgtggaactacaactcttaatggattgtggttggatgacacagtatactgtccaagacatgtcatttgcacagcagaagacatgcttaatcctaactatgaagatctgctcattcgcaaatccaaccatagctttcttgttcaggctggcaatgttcaacttcgtgttattggccattctatgcaaaattgtctgcttaggcttaaagttgatacttctaaccctaagacacccaagtataaatttgtccgtatccaacctggtcaaacattttcagttctagcatgctacaatggttcaccatctggtgtttatcagtgtgccatgagacctaatcataccattaaaggttctttccttaatggatcatgtggtagtgttggttttaacattgattatgattgcgtgtctttctgctatatgcatcatatggagcttccaacaggagtacacgctggtactgacttagaaggtaaattctatggtccatttgttgacagacaaactgcacaggctgcaggtacagacacaaccataacattaaatgttttggcatggctgtatgctgctgttatcaatggtgataggtggtttcttaatagattcaccactactttgaatgactttaaccttgtggcaatgaagtacaactatgaacctttgacacaagatcatgttgacatattgggacctctttctgctcaaacaggaattgccgtcttagatatgtgtgctgctttgaaagagctgctgcagaatggtatgaatggtcgtactatccttggtagcactattttagaagatgagtttacaccatttgatgttgttagacaatgctctggtgttaccttccaaggtaagttcaagaaaattgttaagggcactcatcattggatgcttttaactttcttgacatcactattgattcttgttcaaagtacacagtggtcactgtttttctttgtttacgagaatgctttcttgccatttactcttggtattatggcaattgctgcatgtgctatgctgcttgttaagcataagcacgcattcttgtgcttgtttctgttaccttctcttgcaacagttgcttactttaatatggtctacatgcctgctagctgggtgatgcgtatcatgacatggcttgaattggctgacactagcttgtctggttataggcttaaggattgtgttatgtatgcttcagctttagttttgcttattctcatgacagctcgcactgtttatgatgatgctgctagacgtgtttggacactgatgaatgtcattacacttgtttacaaagtctactatggtaatgctttagatcaagctatttccatgtgggccttagttatttctgtaacctctaactattctggtgtcgttacgactatcatgtttttagctagagctatagtgtttgtgtgtgttgagtattacccattgttatttattactggcaacaccttacagtgtatcatgcttgtttattgtttcttaggctattgttgctgctgctactttggccttttctgtttactcaaccgttacttcaggcttactcttggtgtttatgactacttggtctctacacaagaatttaggtatatgaactcccaggggcttttgcctcctaagagtagtattgatgctttcaagcttaacattaagttgttgggtattggaggtaaaccatgtatcaaggttgctactgtacagtctaaaatgtctgacgtaaagtgcacatctgtggtactgctctcggttcttcaacaacttagagtagagtcatcttctaaattgtgggcacaatgtgtacaactccacaatgatattcttcttgcaaaagacacaactgaagctttcgagaagatggtttctcttttgtctgttttgctatccatgcagggtgctgtagacattaataggttgtgcgaggaaatgctcgataaccgtgctactcttcaggctattgcttcagaatttagttctttaccatcatatgccgcttatgccactgcccaggaggcctatgagcaggctgtagctaatggtgattctgaagtcgttctcaaaaagttaaagaaatctttgaatgtggctaaatctgagtttgaccgtgatgctgccatgcaacgcaagttggaaaagatggcagatcaggctatgacccaaatgtacaaacaggcaagatctgaggacaagagggcaaaagtaactagtgctatgcaaacaatgctcttcactatgcttaggaagcttgataatgatgcacttaacaacattatcaacaatgcgcgtgatggttgtgttccactcaacatcataccattgactacagcagccaaactcatggttgttgtccctgattatggtacctacaagaacacttgtgatggtaacacctttacatatgcatctgcactctgggaaatccagcaagttgttgatgcggatagcaagattgttcaacttagtgaaattaacatggacaattcaccaaatttggcttggcctcttattgttacagctctaagagccaactcagctgttaaactacagaataatgaactgagtccagtagcactacgacagatgtcctgtgcggctggtaccacacaaacagcttgtactgatgacaatgcacttgcctactataacaattcgaagggaggtaggtttgtgctggcattactatcagaccaccaagatctcaaatgggctagattccctaagagtgatggtacaggtacaatttacacagaactggaaccaccttgtaggtttgttacagacacaccaaaagggcctaaagtgaaatacttgtacttcatcaaaggcttaaacaacctaaatagaggtatggtgctgggcagtttagctgctacagtacgtcttcaggctggaaatgctacagaagtacctgccaattcaactgtgctttccttctgtgcttttgcagtagaccctgctaaagcatataaggattacctagcaagtggaggacaaccaatcaccaactgtgtgaagatgttgtgtacacacactggtacaggacaggcaattactgtaacaccagaagctaacatggaccaagagtcctttggtggtgcttcatgttgtctgtattgtagatgccacattgaccatccaaatcctaaaggattctgtgacttgaaaggtaagtacgtccaaatacctaccacttgtgctaatgacccagtgggttttacacttagaaacacagtctgtaccgtctgcggaatgtggaaaggttatggctgtagttgtgaccaactccgcgaacccttgatgcagtctgcggatgcatcaacgtttttaaacgggtttgcggtgtaagtgcagcccgtcttacaccgtgcggcacaggcactagtactgatgtcgtctacagggcttttgatatttacaacgaaaaagttgctggttttgcaaagttcctaaaaactaattgctgtcgcttccaggagaaggatgaggaaggcaatttattagactcttactttgtagttaagaggcatactatgtctaactaccaacatgaagagactatttataacttggttaaagattgtccagcggttgctgtccatgactttttcaagtttagagtagatggtgacatggtaccacatatatcacgtcagcgtctaactaaatacacaatggctgatttagtctatgctctacgtcattttgatgagggtaattgtgatacattaaaagaaatactcgtcacatacaattgctgtgatgatgattatttcaataagaaggattggtatgacttcgtagagaatcctgacatcttacgcgtatatgctaacttaggtgagcgtgtacgccaatcattattaaagactgtacaattctgcgatgctatgcgtgatgcaggcattgtaggcgtactgacattagataatcaggatcttaatgggaactggtacgatttcggtgatttcgtacaagtagcaccaggctgcggagttcctattgtggattcatattactcattgctgatgcccatcctcactttgactagggcattggctgctgagtcccatatggatgctgatctcgcaaaaccacttattaagtgggatttgctgaaatatgattttacggaagagagactttgtctcttcgaccgttattttaaatattgggaccagacataccatcccaattgtattaactgtttggatgataggtgtatccttcattgtgcaaactttaatgtgttattttctactgtgtttccacctacaagttttggaccactagtaagaaaaatatttgtagatggtgttccttttgttgtttcaactggataccattttcgtgagttaggagtcgtacataatcaggatgtaaacttacatagctcgcgtctcagtttcaaggaacttttagtgtatgctgctgatccagctatgcatgcagcttctggcaatttattgctagataaacgcactacatgcttttcagtagctgcactaacaaacaatgttgcttttcaaactgtcaaacccggtaattttaataaagacttttatgactttgctgtgtctaaaggtttctttaaggaaggaagttctgttgaactaaaacacttcttctttgctcaggatggcaacgctgctatcagtgattatgactattatcgttataatctgccaacaatgtgtgatatcagacaactcctattcgtagttgaagttgttgataaatactttgattgttacgatggtggctgtattaatgccaaccaagtaatcgttaacaatctggataaatcagctggtttcccatttaataaatggggtaaggctagactttattatgactcaatgagttatgaggatcaagatgcacttttcgcgtatactaagcgtaatgtcatccctactataactcaaatgaatcttaagtatgccattagtgcaaagaatagagctcgcaccgtagctggtgtctctatctgtagtactatgacaaatagacagtttcatcagaaattattgaagtcaatagccgccactagaggagctactgtggtaattggaacaagcaagttttacggtggctggcataatatgttaaaaactgtttacagtgatgtagaaactccacaccttatgggttgggattatccaaaatgtgacagagccatgcctaacatgcttaggataatggcctctcttgttcttgctcgcaaacataacacttgctgtaacttatcacaccgtttctacaggttagctaacgagtgtgcgcaagtattaagtgagatggtcatgtgtggcggctcactatatgttaaaccaggtggaacatcatccggtgatgctacaactgcttatgctaatagtgtctttaacatttgtcaagctgttacagccaatgtaaatgcacttctttcaactgatggtaataagatagctgacaagtatgtccgcaatctacaacacaggctctatgagtgtctctatagaaatagggatgttgatcatgaattcgtggatgagttttacgcttacctgcgtaaacatttctccatgatgattctttctgatgatgccgttgtgtgctataacagtaactatgcggctcaaggtttagtagctagcattaagaactttaaggcagttctttattatcaaaataatgtgttcatgtctgaggcaaaatgttggactgagactgaccttactaaaggacctcacgaattttgctcacagcatacaatgctagttaaacaaggagatgattacgtgtacctgccttacccagatccatcaagaatattaggcgcaggctgttttgtcgatgatattgtcaaaacagatggtacacttatgattgaaaggttcgtgtcactggctattgatgcttacccacttacaaaacatcctaatcaggagtatgctgatgtctttcacttgtatttacaatacattagaaagttacatgatgagcttactggccacatgttggacatgtattccgtaatgctaactaatgataacacctcacggtactgggaacctgagttttatgaggctatgtacacaccacatacagtcttgcaggctgtaggtgcttgtgtattgtgcaattcacagacttcacttcgttgcggtgcctgtattaggagaccattcctatgttgcaagtgctgctatgaccatgtcatttcaacatcacacaaattagtgttgtctgttaatccctatgtttgcaatgccccaggttgtgatgtcactgatgtgacacaactgtatctaggaggtatgagctattattgcaagtcacataagcctcccattagttttccattatgtgctaatggtcaggtttttggtttatacaaaaacacatgtgtaggcagtgacaatgtcactgacttcaatgcgatagcaacatgtgattggactaatgctggcgattacatacttgccaacacttgtactgagagactcaagcttttcgcagcagaaacgctcaaagccactgaggaaacatttaagctgtcatatggtattgccactgtacgcgaagtactctctgacagagaattgcatctttcatgggaggttggaaaacctagaccaccattgaacagaaactatgtctttactggttaccgtgtaactaaaaatagtaaagtacagattggagagtacacctttgaaaaaggtgactatggtgatgctgttgtgtacagaggtactacgacatacaagttgaatgttggtgattactttgtgttgacatctcacactgtaatgccacttagtgcacctactctagtgccacaagagcactatgtgagaattactggcttgtacccaacactcaacatctcagatgagttttctagcaatgttgcaaattatcaaaaggtcggcatgcaaaagtactctacactccaaggaccacctggtactggtaagagtcattttgccatcggacttgctctctattacccatctgctcgcatagtgtatacggcatgctctcatgcagctgttgatgccctatgtgaaaaggcattaaaatatttgcccatagataaatgtagtagaatcatacctgcgcgtgcgcgcgtagagtgttttgataaattcaaagtgaattcaacactagaacagtatgttttctgcactgtaaatgcattgccagaaacaactgctgacattgtagtctttgatgaaatctctatggctactaattatgacttgagtgttgtcaatgctagacttcgtgcaaaacactacgtctatattggcgatcctgctcaattaccagccccccgcacattgctgactaaaggcacactagaaccagaatattttaattcagtgtgcagacttatgaaaacaataggtccagacatgttccttggaacttgtcgccgttgtcctgctgaaattgttgacactgtgagtgctttagtttatgacaataagctaaaagcacacaaggataagtcagctcaatgcttcaaaatgttctacaaaggtgttattacacatgatgtttcatctgcaatcaacagacctcaaataggcgttgtaagagaatttcttacacgcaatcctgcttggagaaaagctgtttttatctcaccttataattcacagaacgctgtagcttcaaaaatcttaggattgcctacgcagactgttgattcatcacagggttctgaatatgactatgtcatattcacacaaactactgaaacagcacactcttgtaatgtcaaccgcttcaatgtggctatcacaagggcaaaaattggcattttgtgcataatgtctgatagagatctttatgacaaactgcaatttacaagtctagaaataccacgtcgcaatgtggctacattacaagcagaaaatgtaactggactttttaaggactgtagtaagatcattactggtcttcatcctacacaggcacctacacacctcagcgttgatataaagttcaagactgaaggattatgtgttgacataccaggcataccaaaggacatgacctaccgtagactcatctctatgatgggtttcaaaatgaattaccaagtcaatggttaccctaatatgtttatcacccgcgaagaagctattcgtcacgttcgtgcgtggattggctttgatgtagagggctgtcatgcaactagagatgctgtgggtactaacctacctctccagctaggattttctacaggtgttaacttagtagctgtaccgactggttatgttgacactgaaaataacacagaattcaccagagttaatgcaaaacctccaccaggtgaccagtttaaacatcttataccactcatgtataaaggcttgccctggaatgtagtgcgtattaagatagtacaaatgctcagtgatacactgaaaggattgtcagacagagtcgtgttcgtcctttgggcgcatggctttgagcttacatcaatgaagtactttgtcaagattggacctgaaagaacgtgttgtctgtgtgacaaacgtgcaacttgcttttctacttcatcagatacttatgcctgctggaatcattctgtgggttttgactatgtctataacccatttatgattgatgttcagcagtggggctttacgggtaaccttcagagtaaccatgaccaacattgccaggtacatggaaatgcacatgtggctagttgtgatgctatcatgactagatgtttagcagtccatgagtgctttgttaagcgcgttgattggtctgttgaataccctattataggagatgaactgagggttaattctgcttgcagaaaagtacaacacatggttgtgaagtctgcattgcttgctgataagtttccagttcttcatgacattggaaatccaaaggctatcaagtgtgtgcctcaggctgaagtagaatggaagttctacgatgctcagccatgtagtgacaaagcttacaaaatagaggaactcttctattcttatgctacacatcacgataaattcactgatggtgtttgtttgttttggaattgtaacgttgatcgttacccagccaatgcaattgtgtgtaggtttgacacaagagtcttgtcaaacttgaacttaccaggctgtgatggtggtagtttgtatgtgaataagcatgcattccacactccagctttcgataaaagtgcatttactaatttaaagcaattgcctttcttttactattctgatagtccttgtgagtctcatggcaaacaagtagtgtcggatattgattatgttccactcaaatctgctacgtgtattacacgatgcaatttaggtggtgctgtttgcagacaccatgcaaatgagtaccgacagtacttggatgcatataatatgatgatttctgctggatttagcctatggatttacaaacaatttgatacttataacctgtggaatacatttaccaggttacagagtttagaaaatgtggcttataatgttgttaataaaggacactttgatggacacgccggcgaagcacctgtttccatcattaataatgctgtttacacaaaggtagatggtattgatgtggagatctttgaaaataagacaacacttcctgttaatgttgcatttgagctttgggctaagcgtaacattaaaccagtgccagagattaagatactcaataatttgggtgttgatatcgctgctaatactgtaatctgggactacaaaagagaagccccagcacatgtatctacaataggtgtctgcacaatgactgacattgccaagaaacctactgagagtgcttgttcttcacttactgtcttgtttgatggtagagtggaaggacaggtagacctttttagaaacgcccgtaatggtgttttaataacagaaggttcagtcaaaggtctaacaccttcaaagggaccagcacaagctagcgtcaatggagtcacattaattggagaatcagtaaaaacacagtttaactactttaagaaagtagacggcattattcaacagttgcctgaaacctactttactcagagcagagacttagaggattttaagcccagatcacaaatggaaactgactttctcgagctcgctatggatgaattcatacagcgatataagctcgagggctatgccttcgaacacatcgtttatggagatttcagtcatggacaacttggcggtcttcatttaatgataggcttagccaagcgctcacaagattcaccacttaaattagaggattttatccctatggacagcacagtgaaaaattacttcataacagatgcgcaaacaggttcatcaaaatgtgtgtgttctgtgattgatcttttacttgatgactttgtcgagataataaagtcacaagatttgtcagtgatttcaaaagtggtcaaggttacaattgactatgctgaaatttcattcatgctttggtgtaaggatggacatgttgaaaccttctacccaaaactacaagcaagtcaagcgtggcaaccaggtgttgcgatgcctaacttgtacaagatgcaaagaatgcttcttgaaaagtgtgaccttcagaattatggtgaaaatgctgttataccaaaaggaataatgatgaatgtcgcaaagtatactcaactgtgtcaatacttaaatacacttactttagctgtaccctacaacatgagagttattcactttggtgctggctctgataaaggagttgcaccaggtacagctgtgctcagacaatggttgccaactggcacactacttgtcgattcagatcttaatgacttcgtctccgacgcagattctactttaattggagactgtgcaacagtacatacggctaataaatgggaccttattattagcgatatgtatgaccctaggaccaaacatgtgacaaaagagaatgactctaaagaagggtttttcacttatctgtgtggatttataaagcaaaaactagccctgggtggttctatagctgtaaagataacagagcattcttggaatgctgacctttacaagcttatgggccatttctcatggtggacagcttttgttacaaatgtaaatgcatcatcatcggaagcatttttaattggggctaactatcttggcaagccgaaggaacaaattgatggctataccatgcatgctaactacattttctggaggaacacaaatcctatccagttgtcttcctattcactctttgacatgagcaaatttcctcttaaattaagaggaactgctgtaatgtctcttaaggagaatcaaatcaatgatatgatttattctcttctggaaaaaggtaggcttatcattagagaaaacaacagagttgtggtttcaagtgatattcttgttaacaactaaacgaacatgtttattttcttattatttcttactctcactagtggtagtgaccttgaccggtgcaccacttttgatgatgttcaagctcctaattacactcaacatacttcatctatgaggggggtttactatcctgatgaaatttttagatcagacactctttatttaactcaggatttatttcttccattttattctaatgttacagggtttcatactattaatcatacgtttggcaaccctgtcataccttttaaggatggtatttattttgctgccacagagaaatcaaatgttgtccgtggttgggtttttggttctaccatgaacaacaagtcacagtcggtgattattattaacaattctactaatgttgttatacgagcatgtaactttgaattgtgtgacaaccctttctttgctgtttctaaacccatgggtacacagacacatactatgatattcgataatgcatttaattgcactttcgagtacatatctgatgccttttcgcttgatgtttcagaaaagtcaggtaattttaaacacttacgagagtttgtgtttaaaaataaagatgggtttctctatgtttataagggctatcaacctatagatgtagttcgtgatctaccttctggttttaacactttgaaacctatttttaagttgcctcttggtattaacattacaaattttagagccattcttacagccttttcacctgctcaagacatttggggcacgtcagctgcagcctattttgttggctatttaaagccaactacatttatgctcaagtatgatgaaaatggtacaatcacagatgctgttgattgttctcaaaatccacttgctgaactcaaatgctctgttaagagctttgagattgacaaaggaatttaccagacctctaatttcagggttgttccctcaggagatgttgtgagattccctaatattacaaacttgtgtccttttggagaggtttttaatgctactaaattcccttctgtctatgcatgggagagaaaaaaaatttctaattgtgttgctgattactctgtgctctacaactcaacatttttttcaacctttaagtgctatggcgtttctgccactaagttgaatgatctttgcttctccaatgtctatgcagattcttttgtagtcaagggagatgatgtaagacaaatagcgccaggacaaactggtgttattgctgattataattataaattgccagatgatttcatgggttgtgtccttgcttggaatactaggaacattgatgctacttcaactggtaattataattataaatataggtatcttagacatggcaagcttaggccctttgagagagacatatctaatgtgcctttctcccctgatggcaaaccttgcaccccacctgctcttaattgttattggccattaaatgattatggtttttacaccactactggcattggctaccaaccttacagagttgtagtactttcttttgaacttttaaatgcaccggccacggtttgtggaccaaaattatccactgaccttattaagaaccagtgtgtcaattttaattttaatggactcactggtactggtgtgttaactccttcttcaaagagatttcaaccatttcaacaatttggccgtgatgtttctgatttcactgattccgttcgagatcctaaaacatctgaaatattagacatttcaccttgcgcttttgggggtgtaagtgtaattacacctggaacaaatgcttcatctgaagttgctgttctatatcaagatgttaactgcactgatgtttctacagcaattcatgcagatcaactcacaccagcttggcgcatatattctactggaaacaatgtattccagactcaagcaggctgtcttataggagctgagcatgtcgacacttcttatgagtgcgacattcctattggagctggcatttgtgctagttaccatacagtttctttattacgtagtactagccaaaaatctattgtggcttatactatgtctttaggtgctgatagttcaattgcttactctaataacaccattgctatacctactaacttttcaattagcattactacagaagtaatgcctgtttctatggctaaaacctccgtagattgtaatatgtacatctgcggagattctactgaatgtgctaatttgcttctccaatatggtagcttttgcacacaactaaatcgtgcactctcaggtattgctgctgaacaggatcgcaacacacgtgaagtgttcgctcaagtcaaacaaatgtacaaaaccccaactttgaaatattttggtggttttaatttttcacaaatattacctgaccctctaaagccaactaagaggtcttttattgaggacttgctctttaataaggtgacactcgctgatgctggcttcatgaagcaatatggcgaatgcctaggtgatattaatgctagagatctcatttgtgcgcagaagttcaatggacttacagtgttgccacctctgctcactgatgatatgattgctgcctacactgctgctctagttagtggtactgccactgctggatggacatttggtgctggcgctgctcttcaaataccttttgctatgcaaatggcatataggttcaatggcattggagttacccaaaatgttctctatgagaaccaaaaacaaatcgccaaccaatttaacaaggcgattagtcaaattcaagaatcacttacaacaacatcaactgcattgggcaagctgcaagacgttgttaaccagaatgctcaagcattaaacacacttgttaaacaacttagctctaattttggtgcaatttcaagtgtgctaaatgatatcctttcgcgacttgataaagtcgaggcggaggtacaaattgacaggttaattacaggcagacttcaaagccttcaaacctatgtaacacaacaactaatcagggctgctgaaatcagggcttctgctaatcttgctgctactaaaatgtctgagtgtgttcttggacaatcaaaaagagttgacttttgtggaaagggctaccaccttatgtccttcccacaagcagccccgcatggtgttgtcttcctacatgtcacgtatgtgccatcccaggagaggaacttcaccacagcgccagcaatttgtcatgaaggcaaagcatacttccctcgtgaaggtgtttttgtgtttaatggcacttcttggtttattacacagaggaacttcttttctccacaaataattactacagacaatacatttgtctcaggaaattgtgatgtcgttattggcatcattaacaacacagtttatgatcctctgcaacctgagcttgactcattcaaagaagagctggacaagtacttcaaaaatcatacatcaccagatgttgatcttggcgacatttcaggcattaacgcttctgtcgtcaacattcaaaaagaaattgaccgcctcaatgaggtcgctaaaaatttaaatgaatcactcattgaccttcaagaattgggaaaatatgagcaatatattaaatggccttggtatgtttggctcggcttcattgctggactaattgccatcgtcatggttacaatcttgctttgttgcatgactagttgttgcagttgcctcaagggtgcatgctcttgtggttcttgctgcaagtttgatgaggatgactctgagccagttctcaagggtgtcaaattacattacacataaacgaacttatggatttgtttatgagattttttactcttagatcaattactgcacagccagtaaaaattgacaatgcttctcctgcaagtactgttcatgctacagcaacgataccgctacaagcctcactccctttcggatggcttgttattggcgttgcatttcttgctgtttttcagagcgctaccaaaataattgcgctcaataaaagatggcagctagccctttataagggcttccagttcatttgcaatttactgctgctatttgttaccatctattcacatcttttgcttgtcgctgcaggtatggaggcgcaatttttgtacctctatgccttgatatattttctacaatgcatcaacgcatgtagaattattatgagatgttggctttgttggaagtgcaaatccaagaacccattactttatgatgccaactactttgtttgctggcacacacataactatgactactgtataccatataacagtgtcacagatacaattgtcgttactgaaggtgacggcatttcaacaccaaaactcaaagaagactaccaaattggtggttattctgaggataggcactcaggtgttaaagactatgtcgttgtacatggctatttcaccgaagtttactaccagcttgagtctacacaaattactacagacactggtattgaaaatgctacattcttcatctttaacaagcttgttaaagacccaccgaatgtgcaaatacacacaatcgacggctcttcaggagttgctaatccagcaatggatccaatttatgatgagccgacgacgactactagcgtgcctttgtaagcacaagaaagtgagtacgaacttatgtactcattcgtttcggaagaaacaggtacgttaatagttaatagcgtacttctttttcttgctttcgtggtattcttgctagtcacactagccatccttactgcgcttcgattgtgtgcgtactgctgcaatattgttaacgtgagtttagtaaaaccaacggtttacgtctactcgcgtgttaaaaatctgaactcttctgaaggagttcctgatcttctggtctaaacgaactaactattattattattctgtttggaactttaacattgcttatcatggcagacaacggtactattaccgttgaggagcttaaacaactcctggaacaatggaacctagtaataggtttcctattcctagcctggattatgttactacaatttgcctattctaatcggaacaggtttttgtacataataaagcttgttttcctctggctcttgtggccagtaacacttgcttgttttgtgcttgctgctgtctacagaattaattgggtgactggcgggattgcgattgcaatggcttgtattgtaggcttgatgtggcttagctacttcgttgcttccttcaggctgtttgctcgtacccgctcaatgtggtcattcaacccagaaacaaacattcttctcaatgtgcctctccgggggacaattgtgaccagaccgctcatggaaagtgaacttgtcattggtgctgtgatcattcgtggtcacttgcgaatggccggacactccctagggcgctgtgacattaaggacctgccaaaagagatcactgtggctacatcacgaacgctttcttattacaaattaggagcgtcgcagcgtgtaggcactgattcaggttttgctgcatacaaccgctaccgtattggaaactataaattaaatacagaccacgccggtagcaacgacaatattgctttgctagtacagtaagtgacaacagatgtttcatcttgttgacttccaggttacaatagcagagatattgattatcattatgaggactttcaggattgctatttggaatcttgacgttataataagttcaatagtgagacaattatttaagcctctaactaagaagaattattcggagttagatgatgaagaacctatggagttagattatccataaaacgaacatgaaaattattctcttcctgacattgattgtatttacatcttgcgagctatatcactatcaggagtgtgttagaggtacgactgtactactaaaagaaccttgcccatcaggaacatacgagggcaattcaccatttcaccctcttgctgacaataaatttgcactaacttgcactagcacacactttgcttttgcttgtgctgacggtactcgacatacctatcagctgcgtgcaagatcagtttcaccaaaacttttcatcagacaagaggaggttcaacaagagctctactcgccactttttctcattgttgctgctctagtatttttaatactttgcttcaccattaagagaaagacagaatgaatgagctcactttaattgacttctatttgtgctttttagcctttctgctattccttgttttaataatgcttattatattttggttttcactcgaaatccaggatctagaagaaccttgtaccaaagtctaaacgaacatgaaacttctcattgttttgacttgtatttctctatgcagttgcatatgcactgtagtacagcgctgtgcatctaataaacctcatgtgcttgaagatccttgtaaggtacaacactaggggtaatacttatagcactgcttggctttgtgctctaggaaaggttttaccttttcatagatggcacactatggttcaaacatgcacacctaatgttactatcaactgtcaagatccagctggtggtgcgcttatagctaggtgttggtaccttcatgaaggtcaccaaactgctgcatttagagacgtacttgttgttttaaataaacgaacaaattaaaatgtctgataatggaccccaatcaaaccaacgtagtgccccccgcattacatttggtggacccacagattcaactgacaataaccagaatggaggacgcaatggggcaaggccaaaacagcgccgaccccaaggtttacccaataatactgcgtcttggttcacagctctcactcagcatggcaaggaggaacttagattccctcgaggccagggcgttccaatcaacaccaatagtggtccagatgaccaaattggctactaccgaagagctacccgacgagttcgtggtggtgacggcaaaatgaaagagctcagccccagatggtacttctattacctaggaactggcccagaagcttcacttccctacggcgctaacaaagaaggcatcgtatgggttgcaactgagggagccttgaatacacccaaagaccacattggcacccgcaatcctaataacaatgctgccaccgtgctacaacttcctcaaggaacaacattgccaaaaggcttctacgcagagggaagcagaggcggcagtcaagcctcttctcgctcctcatcacgtagtcgcggtaattcaagaaattcaactcctggcagcagtaggggaaattctcctgctcgaatggctagcggaggtggtgaaactgccctcgcgctattgctgctagacagattgaaccagcttgagagcaaagtttctggtaaaggccaacaacaacaaggccaaactgtcactaagaaatctgctgctgaggcatctaaaaagcctcgccaaaaacgtactgccacaaaacagtacaacgtcactcaagcatttgggagacgtggtccagaacaaacccaaggaaatttcggggaccaagacctaatcagacaaggaactgattacaaacattggccgcaaattgcacaatttgctccaagtgcctctgcattctttggaatgtcacgcattggcatggaagtcacaccttcgggaacatggctgacttatcatggagccattaaattggatgacaaagatccacaattcaaagacaacgtcatactgctgaacaagcacattgacgcatacaaaacattcccaccaacagagcctaaaaaggacaaaaagaaaaagactgatgaagctcagcctttgccgcagagacaaaagaagcagcccactgtgactcttcttcctgcggctgacatggatgatttctccagacaacttcaaaattccatgagtggagcttctgctgattcaactcaggcataaacactcatgatgaccacacaaggcagatgggctatgtaaacgttttcgcaattccgtttacgatacatagtctactcttgtgcagaatgaattctcgtaactaaacagcacaagtaggtttagttaactttaatctcacatagcaatctttaatcaatgtgtaacattagggaggacttgaaagagccaccacattttcatcgaggccacgcggagtacgatcgagggtacagtgaataatgctagggagagctgcctatatggaagagccctaatgtgtaaaattaattttagtagtgctatccccatgtgattttaatagcttcttaggagaatgacaaaaaaaaaaaaaaaaaaaaaaaa

SEQ ID NO: 29750 - DNA, 29736 bp, SARS Coronavirus; identical to SEQ ID NO: 29749

SEQ ID NO: 29751 - DNA, 29751 bp, SARS Coronavirus
atattaggtttttacctacccaggaaaagccaaccaacctcgatctcttgtagatctgttctctaaacgaactttaaaatctgtgtagctgtcgctcggctgcatgcctagtgcacctacgcagtataaacaataataaattttactgtcgttgacaagaaacgagtaactcgtccctcttctgcagactgcttacggtttcgtccgtgttgcagtcgatcatcagcatacctaggtttcgtccgggtgtgaccgaaaggtaagatggagagccttgttcttggtgtcaacgagaaaacacacgtccaactcagtttgcctgtccttcaggttagagacgtgctagtgcgtggcttcggggactctgtggaagaggccctatcggaggcacgtgaacacctcaaaaatggcacttgtggtctagtagagctggaaaaaggcgtactgccccagcttgaacagccctatgtgttcattaaacgttctgatgccttaagcaccaatcacggccacaaggtcgttgagctggttgcagaaatggacggcattcagtacggtcgtagcggtataacactgggagtactcgtgccacatgtgggcgaaaccccaattgcataccgcaatgttcttcttcgtaagaacggtaataagggagccggtggtcatagctatggcatcgatctaaagtcttatgacttaggtgacgagcttggcactgatcccattgaagattatgaacaaaactggaacactaagcatggcagtggtgcactccgtgaactcactcgtgagctcaatggaggtgcagtcactcgctatgtcgacaacaatttctgtggcccagatgggtaccctcttgattgcatcaaagattttctcgcacgcgcgggcaagtcaatgtgcactctttccgaacaacttgattacatcgagtcgaagagaggtgtctactgctgccgtgaccatgagcatgaaattgcctggttcactgagcgctctgataagagctacgagcaccagacacccttcgaaattaagagtgccaagaaatttgacactttcaaaggggaatgcccaaagtttgtgtttcctcttaactcaaaagtcaaagtcattcaaccacgtgttgaaaagaaaaagactgagggtttcatggggcgtatacgctctgtgtaccctgttgcatctccacaggagtgtaacaatatgcacttgtctaccttgatgaaatgtaatcattgcgatgaagtttcatggcagacgtgcgactttctgaaagccacttgtgaacattgtggcactgaaaatttagttattgaaggacctactacatgtgggtacctacctactaatgctgtagtgaaaatgccatgtcctgcctgtcaagacccagagattggacctgagcatagtgttgcagattatcacaaccactcaaacattgaaactcgactccgcaagggaggtaggactagatgttttggaggctgtgtgtttgcctatgttggctgctataataagcgtgcctactgggttcctcgtgctagtgctgatattggctcaggccatactggcattactggtgacaatgtggagaccttgaatgaggatctccttgagatactgagtcgtgaacgtgttaacattaacattgttggcgattttcatttgaatgaagaggttgccatcattttggcatctttctctgcttctacaagtgcctttattgacactataaagagtcttgattacaagtctttcaaaaccattgttgagtcctgcggtaactataaagttaccaagggaaagcccgtaaaaggtgcttggaacattggacaacagagatcagttttaacaccactgtgtggttttccctcacaggctgctggtgttatcagatcaatttttgcgcgcacacttgatgcagcaaaccactcaattcctgatttgcaaagagcagctgtcaccatacttgatggtatttctgaacagtcattacgtcttgtcgacgccatggtttatacttcagacctgctcaccaacagtgtcattattatggcatatgtaactggtggtcttgtacaacagacttctcagtggttgtctaatcttttgggcactactgttgaaaaactcaggcctatctttgaatggattgaggcgaaacttagtgcaggagttgaatttctcaaggatgcttgggagattctcaaatttctcattacaggtgtttttgacatcgtcaagggtcaaatacaggttgcttcagataacatcaaggattgtgtaaaatgcttcattgatgttgttaacaaggcactcgaaatgtgcattgatcaagtcactatcgctggcgcaaagttgcgatcactcaacttaggtgaagtcttcatcgctcaaagcaagggactttaccgtcagtgtatacgtggcaaggagcagctgcaactactcatgcctcttaaggcaccaaaagaagtaacctttcttgaaggtgattcacatgacacagtacttacctctgaggaggttgttctcaagaacggtgaactcgaagcactcgagacgcccgttgatagcttcacaaatggagctatcgttggcacaccagtctgtgtaaatggcctcatgctcttagagattaaggacaaagaacaatactgcgcattgtctcctggtttactggctacaaacaatgtctttcgcttaaaagggggtgcaccaattaaaggtgtaacctttggagaagatactgtttgggaagttcaaggttacaagaatgtgagaatcacatttgagcttgatgaacgtgttgacaaagtgcttaatgaaaagtgctctgtctacactgttgaatccggtaccgaagttactgagtttgcatgtgttgtagcagaggctgttgtgaagactttacaaccagtttctgatctccttaccaacatgggtattgatcttgatgagtggagtgtagctacattctacttatttgatgatgctggtgaagaaaacttttcatcacgtatgtattgttccttttaccctccagatgaggaagaagaggacgatgcagagtgtgaggaagaagaaattgatgaaacctgtgaacatgagtacggtacagaggatgattatcaaggtctccctctggaatttggtgcctcagctgaaacagttcgagttgaggaagaagaagaggaagactggctggatgatactactgagcaatcagagattgagccagaaccagaacctacacctgaagaaccagttaatcagtttactggttatttaaaacttactgacaatgttgccattaaatgtgttgacatcgttaaggaggcacaaagtgctaatcctatggtgattgtaaatgctgctaacatacacctgaaacatggtggtggtgtagcaggtgcactcaacaaggcaaccaatggtgccatgcaaaaggagagtgatgattacattaagctaaatggccctcttacagtaggagggtcttgtttgctttctggacataatcttgctaagaagtgtctgcatgttgttggacctaacctaaatgcaggtgaggacatccagcttcttaaggcagcatatgaaaatttcaattcacaggacatcttacttgcaccattgttgtcagcaggcatatttggtgctaaaccacttcagtctttacaagtgtgcgtgcagacggttcgtacacaggtttatattgcagtcaatgacaaagctctttatgagcaggttgtcatggattatcttgataacctgaagcctagagtggaagcacctaaacaagaggagccaccaaacacagaagattccaaaactgaggagaaatctgtcgtacagaagcctgtcgatgtgaagccaaaaattaaggcctgcattgatgaggttaccacaacactggaagaaactaagtttcttaccaataagttactcttgtttgctgatatcaatggtaagctttaccatgattctcagaacatgcttagaggtgaagatatgtctttccttgagaaggatgcaccttacatggtaggtgatgttatcactagtggtgatatcacttgtgttgtaataccctccaaaaaggctggtggcactactgagatgctctcaagagctttgaagaaagtgccagttgatgagtatataaccacgtaccctggacaaggatgtgctggttatacacttgaggaagctaagactgctcttaagaaatgcaaatctgcattttatgtactaccttcagaagcacctaatgctaaggaagagattctaggaactgtatcctggaatttgagagaaatgcttgctcatgctgaagagacaagaaaattaatgcctatatgcatggatgttagagccataatggcaaccatccaacgtaagtataaaggaattaaaattcaagagggcatcgttgactatggtgtccgattcttcttttatactagtaaagagcctgtagcttctattattacgaagctgaactctctaaatgagccgcttgtcacaatgccaattggttatgtgacacatggttttaatcttgaagaggctgcgcgctgtatgcgttctcttaaagctcctgccgtagtgtcagtatcatcaccagatgctgttactacatataatggatacctcacttcgtcatcaaagacatctgaggagcactttgtagaaacagtttctttggctggctcttacagagattggtcctattcaggacagcgtacagagttaggtgttgaatttcttaagcgtggtgacaaaattgtgtaccacactctggagagccccgtcgagtttcatcttgacggtgaggttctttcacttgacaaactaaagagtctcttatccctgcgggaggttaagactataaaagtgttcacaactgtggacaacactaatctccacacacagcttgtggatatgtctatgacatatggacagcagtttggtccaacatacttggatggtgctgatgttacaaaaattaaacctcatgtaaatcatgagggtaagactttctttgtactacctagtgatgacacactacgtagtgaagctttcgagtactaccatactcttgatgagagttttcttggtaggtacatgtctgctttaaaccacacaaagaaatggaaatttcctcaagttggtggtttaacttcaattaaatgggctgataacaattgttatttgtctagtgttttattagcacttcaacagcttgaagtcaaattcaatgcaccagcacttcaagaggcttattatagagcccgtgctggtgatgctgctaacttttgtgcactcatactcgcttacagtaataaaactgttggcgagcttggtgatgtcagagaaactatgacccatcttctacagcatgctaatttggaatctgcaaagcgagttcttaatgtggtgtgtaaacattgtggtcagaaaactactaccttaacgggtgtagaagctgtgatgtatatgggtactctatcttatgataatcttaagacaggtgtttccattccatgtgtgtgtggtcgtgatgctacacaatatctagtacaacaagagtcttcttttgttatgatgtctgcaccacctgctgagtataaattacagcaaggtacattcttatgtgcgaatgagtacactggtaactatcagtgtggtcattacactcatataactgctaaggagaccctctatcgtattgacggagctcaccttacaaagatgtcagagtacaaaggaccagtgactgatgttttctacaaggaaacatcttacactacaaccatcaagcctgtgtcgtataaactcgatggagttacttacacagagattgaaccaaaattggatgggtattataaaaaggataatgcttactatacagagcagcctatagaccttgtaccaactcaaccattaccaaatgcgagttttgataatttcaaactcacatgttctaacacaaaatttgctgatgatttaaatcaaatgacaggcttcacaaagccagcttcacgagagctatctgtcacattcttcccagacttgaatggcgatgtagtggctattgactatagacactattcagcgagtttcaagaaaggtgctaaattactgcataagccaattgtttggcacattaaccaggctacaaccaagacaacgttcaaaccaaacacttggtgtttacgttgtctttggagtacaaagccagtagatacttcaaattcatttgaagttctggcagtagaagacacacaaggaatggacaatcttgcttgtgaaagtcaacaacccacctctgaagaagtagtggaaaatcctaccatacagaaggaagtcatagagtgtgacgtgaaaactaccgaagttgtaggcaatgtcatacttaaaccatcagatgaaggtgttaaagtaacacaagagttaggtcatgaggatcttatggctgcttatgtggaaaacacaagcattaccattaagaaacctaatgagctttcactagccttaggtttaaaaacaattgccactcatggtattgctgcaattaatagtgttccttggagtaaaattttggcttatgtcaaaccattcttaggacaagcagcaattacaacatcaaattgcgctaagagattagcacaacgtgtgtttaacaattatatgccttatgtgtttacattattgttccaattgtgtacttttactaaaagtaccaattctagaattagagcttcactacctacaactattgctaaaaatagtgttaagagtgttgctaaattatgtttggatgccggcattaattatgtgaagtcacccaaattttctaaattgttcacaatcgctatgtggctattgttgttaagtatttgcttaggttctctaatctgtgtaactgctgcttttggtgtactcttatctaattttggtgctccttcttattgtaatggcgttagagaattgtatcttaattcgtctaacgttactactatggatttctgtgaaggttcttttccttgcagcatttgtttaagtggattagactcccttgattcttatccagctcttgaaaccattcaggtgacgatttcatcgtacaagctagacttgacaattttaggtctggccgctgagtgggttttggcatatatgttgttcacaaaattcttttatttattaggtctttcagctataatgcaggtgttctttggctattttgctagtcatttcatcagcaattcttggctcatgtggtttatcattagtattgtacaaatggcacccgtttctgcaatggttaggatgtacatcttctttgcttctttctactacatatggaagagctatgttcatatcatggatggttgcacctcttcgacttgcatgatgtgctataagcgcaatcgtgccacacgcgttgagtgtacaactattgttaatggcatgaagagatctttctatgtctatgcaaatggaggccgtggcttctgcaagactcacaattggaattgtctcaattgtgacacattttgcactggtagtacattcattagtgatgaagttgctcgtgatttgtcactccagtttaaaagaccaatcaaccctactgaccagtcatcgtatattgttgatagtgttgctgtgaaaaatggcgcgcttcacctctactttgacaaggctggtcaaaagacctatgagagacatccgctctcccattttgtcaatttagacaatttgagagctaacaacactaaaggttcactgcctattaatgtcatagtttttgatggcaagtccaaatgcgacgagtctgcttctaagtctgcttctgtgtactacagtcagctgatgtgccaacctattctgttgcttgaccaagctcttgtatcagacgttggagatagtactgaagtttccgttaagatgtttgatgcttatgtcgacaccttttcagcaacttttagtgttcctatggaaaaacttaaggcacttgttgctacagctcacagcgagttagcaaagggtgtagctttagatggtgtcctttctacattcgtgtcagctgcccgacaaggtgttgttgataccgatgttgacacaaaggatgttattgaatgtctcaaactttcacatcactctgacttagaagtgacaggtgacagttgtaacaatttcatgctcacctataataaggttgaaaacatgacgcccagagatcttggcgcatgtattgactgtaatgcaaggcatatcaatgcccaagtagcaaaaagtcacaatgtttcactcatctggaatgtaaaagactacatgtctttatctgaacagctgcgtaaacaaattcgtagtgctgccaagaagaacaacataccttttagactaacttgtgctacaactagacaggttgtcaatgtcataactactaaaatctcactcaagggtggtaagattgttagtacttgttttaaacttatgcttaaggccacattattgtgcgttcttgctgcattggtttgttatatcgttatgccagtacatacattgtcaatccatgatggttacacaaatgaaatcattggttacaaagccattcaggatggtgtcactcgtgacatcatttctactgatgattgttttgcaaataaacatgctggttttgacgcatggtttagccagcgtggtggttcatacaaaaatgacaaaagctgccctgtagtagctgctatcattacaagagagattggtttcatagtgcctggcttaccgggtactgtgctgagagcaatcaatggtgacttcttgcattttctacctcgtgtttttagtgctgttggcaacatttgctacacaccttccaaactcattgagtatagtgattttgctacctctgcttgcgttcttgctgctgagtgtacaatttttaaggatgctatgggcaaacctgtgccatattgttatgacactaatttgctagagggttctatttcttatagtgagcttcgtccagacactcgttatgtgcttatggatggttccatcatacagtttcctaacacttacctggagggttctgttagagtagtaacaacttttgatgctgagtactgtagacatggtacatgcgaaaggtcagaagtaggtatttgcctatctaccagtggtagatgggttcttaataatgagcattacagagctctatcaggagttttctgtggtgttgatgcgatgaatctcatagctaacatctttactcctcttgtgcaacctgtgggtgctttagatgtgtctgcttcagtagtggctggtggtattattgccatattggtgacttgtgctgcctactactttatgaaattcagacgtgtttttggtgagtacaaccatgttgttgctgctaatgcacttttgtttttgatgtctttcactatactctgtctggtaccagcttacagctttctgccgggagtctactcagtcttttacttgtacttgacattctatttcaccaatgatgtttcattcttggctcaccttcaatggtttgccatgttttctcctattgtgcctttttggataacagcaatctatgtattctgtatttctctgaagcactgccattggttctttaacaactatcttaggaaaagagtcatgtttaatggagttacatttagtaccttcgaggaggctgctttgtgtacctttttgctcaacaaggaaatgtacctaaaattgcgtagcgagacactgttgccacttacacagtataacaggtatcttgctctatataacaagtacaagtatttcagtggagccttagatactaccagctatcgtgaagcagcttgctgccacttagcaaaggctctaaatgactttagcaactcaggtgctgatgttctctaccaaccaccacagacatcaatcacttctgctgttctgcagagtggttttaggaaaatggcattcccgtcaggcaaagttgaagggtgcatggtacaagtaacctgtggaactacaactcttaatggattgtggttggatgacacagtatactgtccaagacatgtcatttgcacagcagaagacatgcttaatcctaactatgaagatctgctcattcgcaaatccaaccatagctttcttgttcaggctggcaatgttcaacttcgtgttattggccattctatgcaaaattgtctgcttaggcttaaagttgatacttctaaccctaagacacccaagtataaatttgtccgtatccaacctggtcaaacattttcagttctagcatgctacaatggttcaccatctggtgtttatcagtgtgccatgagacctaatcataccattaaaggttctttccttaatggatcatgtggtagtgttggttttaacattgattatgattgcgtgtctttctgctatatgcatcatatggagcttccaacaggagtacacgctggtactgacttagaaggtaaattctatggtccatttgttgacagacaaactgcacaggctgcaggtacagacacaaccataacattaaatgttttggcatggctgtatgctgctgttatcaatggtgataggtggtttcttaatagattcaccactactttgaatgactttaaccttgtggcaatgaagtacaactatgaacctttgacacaagatcatgttgacatattgggacctctttctgctcaaacaggaattgccgtcttagatatgtgtgctgctttgaaagagctgctgcagaatggtatgaatggtcgtactatccttggtagcactattttagaagatgagtttacaccatttgatgttgttagacaatgctctggtgttaccttccaaggtaagttcaagaaaattgttaagggcactcatcattggatgcttttaactttcttgacatcactattgattcttgttcaaagtacacagtggtcactgtttttctttgtttacgagaatgctttcttgccatttactcttggtattatggcaattgctgcatgtgctatgctgcttgttaagcataagcacgcattcttgtgcttgtttctgttaccttctcttgcaacagttgcttactttaatatggtctacatgcctgctagctgggtgatgcgtatcatgacatggcttgaattggctgacactagcttgtctggttataggcttaaggattgtgttatgtatgcttcagctttagttttgcttattctcatgacagctcgcactgtttatgatgatgctgctagacgtgtttggacactgatgaatgtcattacacttgtttacaaagtctactatggtaatgctttagatcaagctatttccatgtgggccttagttatttctgtaacctctaactattctggtgtcgttacgactatcatgtttttagctagagctatagtgtttgtgtgtgttgagtattacccattgttatttattactggcaacaccttacagtgtatcatgcttgtttattgtttcttaggctattgttgctgctgctactttggccttttctgtttactcaaccgttacttcaggcttactcttggtgtttatgactacttggtctctacacaagaatttaggtatatgaactcccaggggcttttgcctcctaagagtagtattgatgctttcaagcttaacattaagttgttgggtattggaggtaaaccatgtatcaaggttgctactgtacagtctaaaatgtctgacgtaaagtgcacatctgtggtactgctctcggttcttcaacaacttagagtagagtcatcttctaaattgtgggcacaatgtgtacaactccacaatgatattcttcttgcaaaagacacaactgaagctttcgagaagatggtttctcttttgtctgttttgctatccatgcagggtgctgtagacattaataggttgtgcgaggaaatgctcgataaccgtgctactcttcaggctattgcttcagaatttagttctttaccatcatatgccgcttatgccactgcccaggaggcctatgagcaggctgtagctaatggtgattctgaagtcgttctcaaaaagttaaagaaatctttgaatgtggctaaatctgagtttgaccgtgatgctgccatgcaacgcaagttggaaaagatggcagatcaggctatgacccaaatgtacaaacaggcaagatctgaggacaagagggcaaaagtaactagtgctatgcaaacaatgctcttcactatgcttaggaagcttgataatgatgcacttaacaacattatcaacaatgcgcgtgatggttgtgttccactcaacatcataccattgactacagcagccaaactcatggttgttgtccctgattatggtacctacaagaacacttgtgatggtaacacctttacatatgcatctgcactctgggaaatccagcaagttgttgatgcggatagcaagattgttcaacttagtgaaattaacatggacaattcaccaaatttggcttggcctcttattgttacagctctaagagccaactcagctgttaaactacagaataatgaactgagtccagtagcactacgacagatgtcctgtgcggctggtaccacacaaacagcttgtactgatgacaatgcacttgcctactataacaattcgaagggaggtaggtttgtgctggcattactatcagaccaccaagatctcaaatgggctagattccctaagagtgatggtacaggtacaatttacacagaactggaaccaccttgtaggtttgttacagacacaccaaaagggcctaaagtgaaatacttgtacttcatcaaaggcttaaacaacctaaatagaggtatggtgctgggcagtttagctgctacagtacgtcttcaggctggaaatgctacagaagtacctgccaattcaactgtgctttccttctgtgcttttgcagtagaccctgctaaagcatataaggattacctagcaagtggaggacaaccaatcaccaactgtgtgaagatgttgtgtacacacactggtacaggacaggcaattactgtaacaccagaagctaacatggaccaagagtcctttggtggtgcttcatgttgtctgtattgtagatgccacattgaccatccaaatcctaaaggattctgtgacttgaaaggtaagtacgtccaaatacctaccacttgtgctaatgacccagtgggttttacacttagaaacacagtctgtaccgtctgcggaatgtggaaaggttatggctgtagttgtgaccaactccgcgaacccttgatgcagtctgcggatgcatcaacgtttttaaacgggtttgcggtgtaagtgcagcccgtcttacaccgtgcggcacaggcactagtactgatgtcgtctacagggcttttgatatttacaacgaaaaagttgctggttttgcaaagttcctaaaaactaattgctgtcgcttccaggagaaggatgaggaaggcaatttattagactcttactttgtagttaagaggcatactatgtctaactaccaacatgaagagactatttataacttggttaaagattgtccagcggttgctgtccatgactttttcaagtttagagtagatggtgacatggtaccacatatatcacgtcagcgtctaactaaatacacaatggctgatttagtctatgctctacgtcattttgatgagggtaattgtgatacattaaaagaaatactcgtcacatacaattgctgtgatgatgattatttcaataagaaggattggtatgacttcgtagagaatcctgacatcttacgcgtatatgctaacttaggtgagcgtgtacgccaatcattattaaagactgtacaattctgcgatgctatgcgtgatgcaggcattgtaggcgtactgacattagataatcaggatcttaatgggaactggtacgatttcggtgatttcgtacaagtagcaccaggctgcggagttcctattgtggattcatattactcattgctgatgcccatcctcactttgactagggcattggctgctgagtcccatatggatgctgatctcgcaaaaccacttattaagtgggatttgctgaaatatgattttacggaagagagactttgtctcttcgaccgttattttaaatattgggaccagacataccatcccaattgtattaactgtttggatgataggtgtatccttcattgtgcaaactttaatgtgttattttctactgtgtttccacctacaagttttggaccactagtaagaaaaatatttgtagatggtgttccttttgttgtttcaactggataccattttcgtgagttaggagtcgtacataatcaggatgtaaacttacatagctcgcgtctcagtttcaaggaacttttagtgtatgctgctgatccagctatgcatgcagcttctggcaatttattgctagataaacgcactacatgcttttcagtagctgcactaacaaacaatgttgcttttcaaactgtcaaacccggtaattttaataaagacttttatgactttgctgtgtctaaaggtttctttaaggaaggaagttctgttgaactaaaacacttcttctttgctcaggatggcaacgctgctatcagtgattatgactattatcgttataatctgccaacaatgtgtgatatcagacaactcctattcgtagttgaagttgttgataaatactttgattgttacgatggtggctgtattaatgccaaccaagtaatcgttaacaatctggataaatcagctggtttcccatttaataaatggggtaaggctagactttattatgactcaatgagttatgaggatcaagatgcacttttcgcgtatactaagcgtaatgtcatccctactataactcaaatgaatcttaagtatgccattagtgcaaagaatagagctcgcaccgtagctggtgtctctatctgtagtactatgacaaatagacagtttcatcagaaattattgaagtcaatagccgccactagaggagctactgtggtaattggaacaagcaagttttacggtggctggcataatatgttaaaaactgtttacagtgatgtagaaactccacaccttatgggttgggattatccaaaatgtgacagagccatgcctaacatgcttaggataatggcctctcttgttcttgctcgcaaacataacacttgctgtaacttatcacaccgtttctacaggttagctaacgagtgtgcgcaagtattaagtgagatggtcatgtgtggcggctcactatatgttaaaccaggtggaacatcatccggtgatgctacaactgcttatgctaatagtgtctttaacatttgtcaagctgttacagccaatgtaaatgcacttctttcaactgatggtaataagatagctgacaagtatgtccgcaatctacaacacaggctctatgagtgtctctatagaaatagggatgttgatcatgaattcgtggatgagttttacgcttacctgcgtaaacatttctccatgatgattctttctgatgatgccgttgtgtgctataacagtaactatgcggctcaaggtttagtagctagcattaagaactttaaggcagttctttattatcaaaataatgtgttcatgtctgaggcaaaatgttggactgagactgaccttactaaaggacctcacgaattttgctcacagcatacaatgctagttaaacaaggagatgattacgtgtacctgccttacccagatccatcaagaatattaggcgcaggctgttttgtcgatgatattgtcaaaacagatggtacacttatgattgaaaggttcgtgtcactggctattgatgcttacccacttacaaaacatcctaatcaggagtatgctgatgtctttcacttgtatttacaatacattagaaagttacatgatgagcttactggccacatgttggacatgtattccgtaatgctaactaatgataacacctcacggtactgggaacctgagttttatgaggctatgtacacaccacatacagtcttgcaggctgtaggtgcttgtgtattgtgcaattcacagacttcacttcgttgcggtgcctgtattaggagaccattcctatgttgcaagtgctgctatgaccatgtcatttcaacatcacacaaattagtgttgtctgttaatccctatgtttgcaatgccccaggttgtgatgtcactgatgtgacacaactgtatctaggaggtatgagctattattgcaagtcacataagcctcccattagttttccattatgtgctaatggtcaggtttttggtttatacaaaaacacatgtgtaggcagtgacaatgtcactgacttcaatgcgatagcaacatgtgattggactaatgctggcgattacatacttgccaacacttgtactgagagactcaagcttttcgcagcagaaacgctcaaagccactgaggaaacatttaagctgtcatatggtattgccactgtacgcgaagtactctctgacagagaattgcatctttcatgggaggttggaaaacctagaccaccattgaacagaaactatgtctttactggttaccgtgtaactaaaaatagtaaagtacagattggagagtacacctttgaaaaaggtgactatggtgatgctgttgtgtacagaggtactacgacatacaagttgaatgttggtgattactttgtgttgacatctcacactgtaatgccacttagtgcacctactctagtgccacaagagcactatgtgagaattactggcttgtacccaacactcaacatctcagatgagttttctagcaatgttgcaaattatcaaaaggtcggcatgcaaaagtactctacactccaaggaccacctggtactggtaagagtcattttgccatcggacttgctctctattacccatctgctcgcatagtgtatacggcatgctctcatgcagctgttgatgccctatgtgaaaaggcattaaaatatttgcccatagataaatgtagtagaatcatacctgcgcgtgcgcgcgtagagtgttttgataaattcaaagtgaattcaacactagaacagtatgttttctgcactgtaaatgcattgccagaaacaactgctgacattgtagtctttgatgaaatctctatggctactaattatgacttgagtgttgtcaatgctagacttcgtgcaaaacactacgtctatattggcgatcctgctcaattaccagccccccgcacattgctgactaaaggcacactagaaccagaatattttaattcagtgtgcagacttatgaaaacaataggtccagacatgttccttggaacttgtcgccgttgtcctgctgaaattgttgacactgtgagtgctttagtttatgacaataagctaaaagcacacaaggataagtcagctcaatgcttcaaaatgttctacaaaggtgttattacacatgatgtttcatctgcaatcaacagacctcaaataggcgttgtaagagaatttcttacacgcaatcctgcttggagaaaagctgtttttatctcaccttataattcacagaacgctgtagcttcaaaaatcttaggattgcctacgcagactgttgattcatcacagggttctgaatatgactatgtcatattcacacaaactactgaaacagcacactcttgtaatgtcaaccgcttcaatgtggctatcacaagggcaaaaattggcattttgtgcataatgtctgatagagatctttatgacaaactgcaatttacaagtctagaaataccacgtcgcaatgtggctacattacaagcagaaaatgtaactggactttttaaggactgtagtaagatcattactggtcttcatcctacacaggcacctacacacctcagcgttgatataaagttcaagactgaaggattatgtgttgacataccaggcataccaaaggacatgacctaccgtagactcatctctatgatgggtttcaaaatgaattaccaagtcaatggttaccctaatatgtttatcacccgcgaagaagctattcgtcacgttcgtgcgtggattggctttgatgtagagggctgtcatgcaactagagatgctgtgggtactaacctacctctccagctaggattttctacaggtgttaacttagtagctgtaccgactggttatgttgacactgaaaataacacagaattcaccagagttaatgcaaaacctccaccaggtgaccagtttaaacatcttataccactcatgtataaaggcttgccctggaatgtagtgcgtattaagatagtacaaatgctcagtgatacactgaaaggattgtcagacagagtcgtgttcgtcctttgggcgcatggctttgagcttacatcaatgaagtactttgtcaagattggacctgaaagaacgtgttgtctgtgtgacaaacgtgcaacttgcttttctacttcatcagatacttatgcctgctggaatcattctgtgggttttgactatgtctataacccatttatgattgatgttcagcagtggggctttacgggtaaccttcagagtaaccatgaccaacattgccaggtacatggaaatgcacatgtggctagttgtgatgctatcatgactagatgtttagcagtccatgagtgctttgttaagcgcgttgattggtctgttgaataccctattataggagatgaactgagggttaattctgcttgcagaaaagtacaacacatggttgtgaagtctgcattgcttgctgataagtttccagttcttcatgacattggaaatccaaaggctatcaagtgtgtgcctcaggctgaagtagaatggaagttctacgatgctcagccatgtagtgacaaagcttacaaaatagaggaactcttctattcttatgctacacatcacgataaattcactgatggtgtttgtttgttttggaattgtaacgttgatcgttacccagccaatgcaattgtgtgtaggtttgacacaagagtcttgtcaaacttgaacttaccaggctgtgatggtggtagtttgtatgtgaataagcatgcattccacactccagctttcgataaaagtgcatttactaatttaaagcaattgcctttcttttactattctgatagtccttgtgagtctcatggcaaacaagtagtgtcggatattgattatgttccactcaaatctgctacgtgtattacacgatgcaatttaggtggtgctgtttgcagacaccatgcaaatgagtaccgacagtacttggatgcatataatatgatgatttctgctggatttagcctatggatttacaaacaatttgatacttataacctgtggaatacatttaccaggttacagagtttagaaaatgtggcttataatgttgttaataaaggacactttgatggacacgccggcgaagcacctgtttccatcattaataatgctgtttacacaaaggtagatggtattgatgtggagatctttgaaaataagacaacacttcctgttaatgttgcatttgagctttgggctaagcgtaacattaaaccagtgccagagattaagatactcaataatttgggtgttgatatcgctgctaatactgtaatctgggactacaaaagagaagccccagcacatgtatctacaataggtgtctgcacaatgactgacattgccaagaaacctactgagagtgcttgttcttcacttactgtcttgtttgatggtagagtggaaggacaggtagacctttttagaaacgcccgtaatggtgttttaataacagaaggttcagtcaaaggtctaacaccttcaaagggaccagcacaagctagcgtcaatggagtcacattaattggagaatcagtaaaaacacagtttaactactttaagaaagtagacggcattattcaacagttgcctgaaacctactttactcagagcagagacttagaggattttaagcccagatcacaaatggaaactgactttctcgagctcgctatggatgaattcatacagcgatataagctcgagggctatgccttcgaacacatcgtttatggagatttcagtcatggacaacttggcggtcttcatttaatgataggcttagccaagcgctcacaagattcaccacttaaattagaggattttatccctatggacagcacagtgaaaaattacttcataacagatgcgcaaacaggttcatcaaaatgtgtgtgttctgtgattgatcttttacttgatgactttgtcgagataataaagtcacaagatttgtcagtgatttcaaaagtggtcaaggttacaattgactatgctgaaatttcattcatgctttggtgtaaggatggacatgttgaaaccttctacccaaaactacaagcaagtcaagcgtggcaaccaggtgttgcgatgcctaacttgtacaagatgcaaagaatgcttcttgaaaagtgtgaccttcagaattatggtgaaaatgctgttataccaaaaggaataatgatgaatgtcgcaaagtatactcaactgtgtcaatacttaaatacacttactttagctgtaccctacaacatgagagttattcactttggtgctggctctgataaaggagttgcaccaggtacagctgtgctcagacaatggttgccaactggcacactacttgtcgattcagatcttaatgacttcgtctccgacgcagattctactttaattggagactgtgcaacagtacatacggctaataaatgggaccttattattagcgatatgtatgaccctaggaccaaacatgtgacaaaagagaatgactctaaagaagggtttttcacttatctgtgtggatttataaagcaaaaactagccctgggtggttctatagctgtaaagataacagagcattcttggaatgctgacctttacaagcttatgggccatttctcatggtggacagcttttgttacaaatgtaaatgcatcatcatcggaagcatttttaattggggctaactatcttggcaagccgaaggaacaaattgatggctataccatgcatgctaactacattttctggaggaacacaaatcctatccagttgtcttcctattcactctttgacatgagcaaatttcctcttaaattaagaggaactgctgtaatgtctcttaaggagaatcaaatcaatgatatgatttattctcttctggaaaaaggtaggcttatcattagagaaaacaacagagttgtggtttcaagtgatattcttgttaacaactaaacgaacatgtttattttcttattatttcttactctcactagtggtagtgaccttgaccggtgcaccacttttgatgatgttcaagctcctaattacactcaacatacttcatctatgaggggggtttactatcctgatgaaatttttagatcagacactctttatttaactcaggatttatttcttccattttattctaatgttacagggtttcatactattaatcatacgtttggcaaccctgtcataccttttaaggatggtatttattttgctgccacagagaaatcaaatgttgtccgtggttgggtttttggttctaccatgaacaacaagtcacagtcggtgattattattaacaattctactaatgttgttatacgagcatgtaactttgaattgtgtgacaaccctttctttgctgtttctaaacccatgggtacacagacacatactatgatattcgataatgcatttaattgcactttcgagtacatatctgatgccttttcgcttgatgtttcagaaaagtcaggtaattttaaacacttacgagagtttgtgtttaaaaataaagatgggtttctctatgtttataagggctatcaacctatagatgtagttcgtgatctaccttctggttttaacactttgaaacctatttttaagttgcctcttggtattaacattacaaattttagagccattcttacagccttttcacctgctcaagacatttggggcacgtcagctgcagcctattttgttggctatttaaagccaactacatttatgctcaagtatgatgaaaatggtacaatcacagatgctgttgattgttctcaaaatccacttgctgaactcaaatgctctgttaagagctttgagattgacaaaggaatttaccagacctctaatttcagggttgttccctcaggagatgttgtgagattccctaatattacaaacttgtgtccttttggagaggtttttaatgctactaaattcccttctgtctatgcatgggagagaaaaaaaatttctaattgtgttgctgattactctgtgctctacaactcaacatttttttcaacctttaagtgctatggcgtttctgccactaagttgaatgatctttgcttctccaatgtctatgcagattcttttgtagtcaagggagatgatgtaagacaaatagcgccaggacaaactggtgttattgctgattataattataaattgccagatgatttcatgggttgtgtccttgcttggaatactaggaacattgatgctacttcaactggtaattataattataaatataggtatcttagacatggcaagcttaggccctttgagagagacatatctaatgtgcctttctcccctgatggcaaaccttgcaccccacctgctcttaattgttattggccattaaatgattatggtttttacaccactactggcattggctaccaaccttacagagttgtagtactttcttttgaacttttaaatgcaccggccacggtttgtggaccaaaattatccactgaccttattaagaaccagtgtgtcaattttaattttaatggactcactggtactggtgtgttaactccttcttcaaagagatttcaaccatttcaacaatttggccgtgatgtttctgatttcactgattccgttcgagatcctaaaacatctgaaatattagacatttcaccttgcgcttttgggggtgtaagtgtaattacacctggaacaaatgcttcatctgaagttgctgttctatatcaagatgttaactgcactgatgtttctacagcaattcatgcagatcaactcacaccagcttggcgcatatattctactggaaacaatgtattccagactcaagcaggctgtcttataggagctgagcatgtcgacacttcttatgagtgcgacattcctattggagctggcatttgtgctagttaccatacagtttctttattacgtagtactagccaaaaatctattgtggcttatactatgtctttaggtgctgatagttcaattgcttactctaataacaccattgctatacctactaacttttcaattagcattactacagaagtaatgcctgtttctatggctaaaacctccgtagattgtaatatgtacatctgcggagattctactgaatgtgctaatttgcttctccaatatggtagcttttgcacacaactaaatcgtgcactctcaggtattgctgctgaacaggatcgcaacacacgtgaagtgttcgctcaagtcaaacaaatgtacaaaaccccaactttgaaatattttggtggttttaatttttcacaaatattacctgaccctctaaagccaactaagaggtcttttattgaggacttgctctttaataaggtgacactcgctgatgctggcttcatgaagcaatatggcgaatgcctaggtgatattaatgctagagatctcatttgtgcgcagaagttcaatggacttacagtgttgccacctctgctcactgatgatatgattgctgcctacactgctgctctagttagtggtactgccactgctggatggacatttggtgctggcgctgctcttcaaataccttttgctatgcaaatggcatataggttcaatggcattggagttacccaaaatgttctctatgagaaccaaaaacaaatcgccaaccaatttaacaaggcgattagtcaaattcaagaatcacttacaacaacatcaactgcattgggcaagctgcaagacgttgttaaccagaatgctcaagcattaaacacacttgttaaacaacttagctctaattttggtgcaatttcaagtgtgctaaatgatatcctttcgcgacttgataaagtcgaggcggaggtacaaattgacaggttaattacaggcagacttcaaagccttcaaacctatgtaacacaacaactaatcagggctgctgaaatcagggcttctgctaatcttgctgctactaaaatgtctgagtgtgttcttggacaatcaaaaagagttgacttttgtggaaagggctaccaccttatgtccttcccacaagcagccccgcatggtgttgtcttcctacatgtcacgtatgtgccatcccaggagaggaacttcaccacagcgccagcaatttgtcatgaaggcaaagcatacttccctcgtgaaggtgtttttgtgtttaatggcacttcttggtttattacacagaggaacttcttttctccacaaataattactacagacaatacatttgtctcaggaaattgtgatgtcgttattggcatcattaacaacacagtttatgatcctctgcaacctgagcttgactcattcaaagaagagctggacaagtacttcaaaaatcatacatcaccagatgttgatcttggcgacatttcaggcattaacgcttctgtcgtcaacattcaaaaagaaattgaccgcctcaatgaggtcgctaaaaatttaaatgaatcactcattgaccttcaagaattgggaaaatatgagcaatatattaaatggccttggtatgtttggctcggcttcattgctggactaattgccatcgtcatggttacaatcttgctttgttgcatgactagttgttgcagttgcctcaagggtgcatgctcttgtggttcttgctgcaagtttgatgaggatgactctgagccagttctcaagggtgtcaaattacattacacataaacgaacttatggatttgtttatgagattttttactcttagatcaattactgcacagccagtaaaaattgacaatgcttctcctgcaagtactgttcatgctacagcaacgataccgctacaagcctcactccctttcggatggcttgttattggcgttgcatttcttgctgtttttcagagcgctaccaaaataattgcgctcaataaaagatggcagctagccctttataagggcttccagttcatttgcaatttactgctgctatttgttaccatctattcacatcttttgcttgtcgctgcaggtatggaggcgcaatttttgtacctctatgccttgatatattttctacaatgcatcaacgcatgtagaattattatgagatgttggctttgttggaagtgcaaatccaagaacccattactttatgatgccaactactttgtttgctggcacacacataactatgactactgtataccatataacagtgtcacagatacaattgtcgttactgaaggtgacggcatttcaacaccaaaactcaaagaagactaccaaattggtggttattctgaggataggcactcaggtgttaaagactatgtcgttgtacatggctatttcaccgaagtttactaccagcttgagtctacacaaattactacagacactggtattgaaaatgctacattcttcatctttaacaagcttgttaaagacccaccgaatgtgcaaatacacacaatcgacggctcttcaggagttgctaatccagcaatggatccaatttatgatgagccgacgacgactactagcgtgcctttgtaagcacaagaaagtgagtacgaacttatgtactcattcgtttcggaagaaacaggtacgttaatagttaatagcgtacttctttttcttgctttcgtggtattcttgctagtcacactagccatccttactgcgcttcgattgtgtgcgtactgctgcaatattgttaacgtgagtttagtaaaaccaacggtttacgtctactcgcgtgttaaaaatctgaactcttctgaaggagttcctgatcttctggtctaaacgaactaactattattattattctgtttggaactttaacattgcttatcatggcagacaacggtactattaccgttgaggagcttaaacaactcctggaacaatggaacctagtaataggtttcctattcctagcctggattatgttactacaatttgcctattctaatcggaacaggtttttgtacataataaagcttgttttcctctggctcttgtggccagtaacacttgcttgttttgtgcttgctgctgtctacagaattaattgggtgactggcgggattgcgattgcaatggcttgtattgtaggcttgatgtggcttagctacttcgttgcttccttcaggctgtttgctcgtacccgctcaatgtggtcattcaacccagaaacaaacattcttctcaatgtgcctctccgggggacaattgtgaccagaccgctcatggaaagtgaacttgtcattggtgctgtgatcattcgtggtcacttgcgaatggccggacactccctagggcgctgtgacattaaggacctgccaaaagagatcactgtggctacatcacgaacgctttcttattacaaattaggagcgtcgcagcgtgtaggcactgattcaggttttgctgcatacaaccgctaccgtattggaaactataaattaaatacagaccacgccggtagcaacgacaatattgctttgctagtacagtaagtgacaacagatgtttcatcttgttgacttccaggttacaatagcagagatattgattatcattatgaggactttcaggattgctatttggaatcttgacgttataataagttcaatagtgagacaattatttaagcctctaactaagaagaattattcggagttagatgatgaagaacctatggagttagattatccataaaacgaacatgaaaattattctcttcctgacattgattgtatttacatcttgcgagctatatcactatcaggagtgtgttagaggtacgactgtactactaaaagaaccttgcccatcaggaacatacgagggcaattcaccatttcaccctcttgctgacaataaatttgcactaacttgcactagcacacactttgcttttgcttgtgctgacggtactcgacatacctatcagctgcgtgcaagatcagtttcaccaaaacttttcatcagacaagaggaggttcaacaagagctctactcgccactttttctcattgttgctgctctagtatttttaatactttgcttcaccattaagagaaagacagaatgaatgagctcactttaattgacttctatttgtgctttttagcctttctgctattccttgttttaataatgcttattatattttggttttcactcgaaatccaggatctagaagaaccttgtaccaaagtctaaacgaacatgaaacttctcattgttttgacttgtatttctctatgcagttgcatatgcactgtagtacagcgctgtgcatctaataaacctcatgtgcttgaagatccttgtaaggtacaacactaggggtaatacttatagcactgcttggctttgtgctctaggaaaggttttaccttttcatagatggcacactatggttcaaacatgcacacctaatgttactatcaactgtcaagatccagctggtggtgcgcttatagctaggtgttggtaccttcatgaaggtcaccaaactgctgcatttagagacgtacttgttgttttaaataaacgaacaaattaaaatgtctgataatggaccccaatcaaaccaacgtagtgccccccgcattacatttggtggacccacagattcaactgacaataaccagaatggaggacgcaatggggcaaggccaaaacagcgccgaccccaaggtttacccaataatactgcgtcttggttcacagctctcactcagcatggcaaggaggaacttagattccctcgaggccagggcgttccaatcaacaccaatagtggtccagatgaccaaattggctactaccgaagagctacccgacgagttcgtggtggtgacggcaaaatgaaagagctcagccccagatggtacttctattacctaggaactggcccagaagcttcacttccctacggcgctaacaaagaaggcatcgtatgggttgcaactgagggagccttgaatacacccaaagaccacattggcacccgcaatcctaataacaatgctgccaccgtgctacaacttcctcaaggaacaacattgccaaaaggcttctacgcagagggaagcagaggcggcagtcaagcctcttctcgctcctcatcacgtagtcgcggtaattcaagaaattcaactcctggcagcagtaggggaaattctcctgctcgaatggctagcggaggtggtgaaactgccctcgcgctattgctgctagacagattgaaccagcttgagagcaaagtttctggtaaaggccaacaacaacaaggccaaactgtcactaagaaatctgctgctgaggcatctaaaaagcctcgccaaaaacgtactgccacaaaacagtacaacgtcactcaagcatttgggagacgtggtccagaacaaacccaaggaaatttcggggaccaagacctaatcagacaaggaactgattacaaacattggccgcaaattgcacaatttgctccaagtgcctctgcattctttggaatgtcacgcattggcatggaagtcacaccttcgggaacatggctgacttatcatggagccattaaattggatgacaaagatccacaattcaaagacaacgtcatactgctgaacaagcacattgacgcatacaaaacattcccaccaacagagcctaaaaaggacaaaaagaaaaagactgatgaagctcagcctttgccgcagagacaaaagaagcagcccactgtgactcttcttcctgcggctgacatggatgatttctccagacaacttcaaaattccatgagtggagcttctgctgattcaactcaggcataaacactcatgatgaccacacaaggcagatgggctatgtaaacgttttcgcaattccgtttacgatacatagtctactcttgtgcagaatgaattctcgtaactaaacagcacaagtaggtttagttaactttaatctcacatagcaatctttaatcaatgtgtaacattagggaggacttgaaagagccaccacattttcatcgaggccacgcggagtacgatcgagggtacagtgaataatgctagggagagctgcctatatggaagagccctaatgtgtaaaattaattttagtagtgctatccccatgtgattttaatagcttcttaggagaatgacaaaaaaaaaaaaaaaaaaaaaaaa

SEQ ID NO: 29752 - DNA, 29751 bp, SARS Coronavirus; identical to SEQ ID NO: 29751
  misc_structure (13392)...(13477): Frameshift Site
  misc_structure (13392)...(13398): Slippery Site
  misc_structure (13405)...(13477): Pseudoknot
  misc_structure (13405)...(13414): Stem 1 up
  misc_structure (13418)...(13422): Stem 2 down
  misc_structure (13425)...(13434): Stem 1 down
  misc_structure (13468)...(13472): Stem 2 up
  misc_structure (13405)...(13414): Loop 1
  misc_structure (13438)...(13458): Loop 2

SEQ ID NO: 29753 - DNA, 29725 bp, SARS Coronavirus
ccaggaaaagccaaccaacctcgatctcttgtagatctgttctctaaacgaactttaaaatctgtgtagctgtcgctcggctgcatgcctagtgcacctacgcagtataaacaataataaattttactgtcgttgacaagaaacgagtaactcgtccctcttctgcagactgcttacggtttcgtccgtgttgcagtcgatcatcagcatacctaggtttcgtccgggtgtgaccgaaaggtaagatggagagccttgttcttggtgtcaacgagaaaacacacgtccaactcagtttgcctgtccttcaggttagagacgtgctagtgcgtggcttcggggactctgtggaagaggccctatcggaggcacgtgaacacctcaaaaatggcacttgtggtctagtagagctggaaaaaggcgtactgccccagcttgaacagccctatgtgttcattaaacgttctgatgccttaagcaccaatcacggccacaaggtcgttgagctggttgcagaaatggacggcattcagtacggtcgtagcggtataacactgggagtactcgtgccacatgtgggcgaaaccccaattgcataccgcaatgttcttcttcgtaagaacggtaataagggagccggtggtcatagctatggcatcgatctaaagtcttatgacttaggtgacgagcttggcactgatcccattgaagattatgaacaaaactggaacactaagcatggcagtggtgcactccgtgaactcactcgtgagctcaatggaggtgcagtcactcgctatgtcgacaacaatttctgtggcccagatgggtaccctcttgattgcatcaaagattttctcgcacgcgcgggcaagtcaatgtgcactctttccgaacaacttgattacatcgagtcgaagagaggtgtctactgctgccgtgaccatgagcatgaaattgcctggttcactgagcgctctgataagagctacgagcaccagacacccttcgaaattaagagtgccaagaaatttgacactttcaaaggggaatgcccaaagtttgtgtttcctcttaactcaaaagtcaaagtcattcaaccacgtgttgaaaagaaaaagactgagggtttcatggggcgtatacgctctgtgtaccctgttgcatctccacaggagtgtaacaatatgcacttgtctaccttgatgaaatgtaatcattgcgatgaagtttcatggcagacgtgcgactttctgaaagccacttgtgaacattgtggcactgaaaatttagttattgaaggacctactacatgtgggtacctacctactaatgctgtagtgaaaatgccatgtcctgcctgtcaagacccagagattggacctgagcatagtgttgcagattatcacaaccactcaaacattgaaactcgactccgcaagggaggtaggactagatgttttggaggctgtgtgtttgcctatgttggctgctataataagcgtgcctactgggttcctcgtgctagtgctgatattggctcaggccatactggcattactggtgacaatgtggagaccttgaatgaggatctccttgagatactgagtcgtgaacgtgttaacattaacattgttggcgattttcatttgaatgaagaggttgccatcattttggcatctttctctgcttctacaagtgcctttattgacactataaagagtcttgattacaagtctttcaaaaccattgttgagtcctgcggtaactataaagttaccaagggaaagcccgtaaaaggtgcttggaacattggacaacagagatcagttttaacaccactgtgtggttttccctcacaggctgctggtgttatcagatcaatttttgcgcgcacacttgatgcagcaaaccactcaattcctgatttgcaaagagcagctgtcaccatacttgatggtatttctgaacagtcattacgtcttgtcgacgccatggtttatacttcagacctgctcaccaacagtgtcattattatggcatatgtaactggtggtcttgtacaacagacttctcagtggttgtctaatcttttgggcactactgttgaaaaactcaggcctatctttgaatggattgaggcgaaacttagtgcaggagttgaatttctcaaggatgcttgggagattctcaaatttctcattacaggtgtttttgacatcgtcaagggtcaaatacaggttgcttcagataacatcaaggattgtgtaaaatgcttcattgatgttgttaacaaggcactcgaaatgtgcattgatcaagtcactatcgctggcgcaaagttgcgatcactcaacttaggtgaagtcttcatcgctcaaagcaagggactttaccgtcagtgtatacgtggcaaggagcagctgcaactactcatgcctcttaaggcaccaaaagaagtaacctttcttgaaggtgattcacatgacacagtacttacctctgaggaggttgttctcaagaacggtgaactcgaagcactcgagacgcccgttgatagcttcacaaatggagctatcgttggcacaccagtctgtgtaaatggcctcatgctcttagagattaaggacaaagaacaatactgcgcattgtctcctggtttactggctacaaacaatgtctttcgcttaaaagggggtgcaccaattaaaggtgtaacctttggagaagatactgtttgggaagttcaaggttacaagaatgtgagaatcacatttgagcttgatgaacgtgttgacaaagtgcttaatgaaaagtgctctgtctacactgttgaatccggtaccgaagttactgagtttgcatgtgttgtagcagaggctgttgtgaagactttacaaccagtttctgatctccttaccaacatgggtattgatcttgatgagtggagtgtagctacattctacttatttgatgatgctggtgaagaaaacttttcatcacgtatgtattgttccttttaccctccagatgaggaagaagaggacgatgcagagtgtgaggaagaagaaattgatgaaacctgtgaacatgagtacggtacagaggatgattatcaaggtctccctctggaatttggtgcctcagctgaaacagttcgagttgaggaagaagaagaggaagactggctggatgatactactgagcaatcagagattgagccagaaccagaacctacacctgaagaaccagttaatcagtttactggttatttaaaacttactgacaatgttgccattaaatgtgttgacatcgttaaggaggcacaaagtgctaatcctatggtgattgtaaatgctgctaacatacacctgaaacatggtggtggtgtagcaggtgcactcaacaaggcaaccaatggtgccatgcaaaaggagagtgatgattacattaagctaaatggccctcttacagtaggagggtcttgtttgctttctggacataatcttgctaagaagtgtctgcatgttgttggacctaacctaaatgcaggtgaggacatccagcttcttaaggcagcatatgaaaatttcaattcacaggacatcttacttgcaccattgttgtcagcaggcatatttggtgctaaaccacttcagtctttacaagtgtgcgtgcagacggttcgtacacaggtttatattgcagtcaatgacaaagctctttatgagcaggttgtcatggattatcttgataacctgaagcctagagtggaagcacctaaacaagaggagccaccaaacacagaagattccaaaactgaggagaaatctgtcgtacagaagcctgtcgatgtgaagccaaaaattaaggcctgcattgatgaggttaccacaacactggaagaaactaagtttcttaccaataagttactcttgtttgctgatatcaatggtaagctttaccatgattctcagaacatgcttagaggtgaagatatgtctttccttgagaaggatgcaccttacatggtaggtgatgttatcactagtggtgatatcacttgtgttgtaataccctccaaaaaggctggtggcactactgagatgctctcaagagctttgaagaaagtgccagttgatgagtatataaccacgtaccctggacaaggatgtgctggttatacacttgaggaagctaagactgctcttaagaaatgcaaatctgcattttatgtactaccttcagaagcacctaatgctaaggaagagattctaggaactgtatcctggaatttgagagaaatgcttgctcatgctgaagagacaagaaaattaatgcctatatgcatggatgttagagccataatggcaaccatccaacgtaagtataaaggaattaaaattcaagagggcatcgttgactatggtgtccgattcttcttttatactagtaaagagcctgtagcttctattattacgaagctgaactctctaaatgagccgcttgtcacaatgccaattggttatgtgacacatggttttaatcttgaagaggctgcgcgctgtatgcgttctcttaaagctcctgccgtagtgtcagtatcatcaccagatgctgttactacatataatggatacctcacttcgtcatcaaagacatctgaggagcactttgtagaaacagtttctttggctggctcttacagagattggtcctattcaggacagcgtacagagttaggtgttgaatttcttaagcgtggtgacaaaattgtgtaccacactctggagagccccgtcgagtttcatcttgacggtgaggttctttcacttgacaaactaaagagtctcttatccctgcgggaggttaagactataaaagtgttcacaactgtggacaacactaatctccacacacagcttgtggatatgtctatgacatatggacagcagtttggtccaacatacttggatggtgctgatgttacaaaaattaaacctcatgtaaatcatgagggtaagactttctttgtactacctagtgatgacacactacgtagtgaagctttcgagtactaccatactcttgatgagagttttcttggtaggtacatgtctgctttaaaccacacaaagaaatggaaatttcctcaagttggtggtttaacttcaattaaatgggctgataacaattgttatttgtctagtgttttattagcacttcaacagcttgaagtcaaattcaatgcaccagcacttcaagaggcttattatagagcccgtgctggtgatgctgctaacttttgtgcactcatactcgcttacagtaataaaactgttggcgagcttggtgatgtcagagaaactatgacccatcttctacagcatgctaatttggaatctgcaaagcgagttcttaatgtggtgtgtaaacattgtggtcagaaaactactaccttaacgggtgtagaagctgtgatgtatatgggtactctatcttatgataatcttaagacaggtgtttccattccatgtgtgtgtggtcgtgatgctacacaatatctagtacaacaagagtcttcttttgttatgatgtctgcaccacctgctgagtataaattacagcaaggtacattcttatgtgcgaatgagtacactggtaactatcagtgtggtcattacactcatataactgctaaggagaccctctatcgtattgacggagctcaccttacaaagatgtcagagtacaaaggaccagtgactgatgttttctacaaggaaacatcttacactacaaccatcaagcctgtgtcgtataaactcgatggagttacttacacagagattgaaccaaaattggatgggtattataaaaaggataatgcttactatacagagcagcctatagaccttgtaccaactcaaccattaccaaatgcgagttttgataatttcaaactcacatgttctaacacaaaatttgctgatgatttaaatcaaatgacaggcttcacaaagccagcttcacgagagctatctgtcacattcttcccagacttgaatggcgatgtagtggctattgactatagacactattcagcgagtttcaagaaaggtgctaaattactgcataagccaattgtttggcacattaaccaggctacaaccaagacaacgttcaaaccaaacacttggtgtttacgttgtctttggagtacaaagccagtagatacttcaaattcatttgaagttctggcagtagaagacacacaaggaatggacaatcttgcttgtgaaagtcaacaacccacctctgaagaagtagtggaaaatcctaccatacagaaggaagtcatagagtgtgacgtgaaaactaccgaagttgtaggcaatgtcatacttaaaccatcagatgaaggtgttaaagtaacacaagagttaggtcatgaggatcttatggctgcttatgtggaaaacacaagcattaccattaagaaacctaatgagctttcactagccttaggtttaaaaacaattgccactcatggtattgctgcaattaatagtgttccttggagtaaaattttggcttatgtcaaaccattcttaggacaagcagcaattacaacatcaaattgcgctaagagattagcacaacgtgtgtttaacaattatatgccttatgtgtttacattattgttccaattgtgtacttttactaaaagtaccaattctagaattagagcttcactacctacaactattgctaaaaatagtgttaagagtgttgctaaattatgtttggatgccggcattaattatgtgaagtcacccaaattttctaaattgttcacaatcgctatgtggctattgttgttaagtatttgcttaggttctctaatctgtgtaactgctgcttttggtgtactcttatctaattttggtgctccttcttattgtaatggcgttagagaattgtatcttaattcgtctaacgttactactatggatttctgtgaaggttcttttccttgcagcatttgtttaagtggattagactcccttgattcttatccagctcttgaaaccattcaggtgacgatttcatcgtacaagctagacttgacaattttaggtctggccgctgagtgggttttggcatatatgttgttcacaaaattcttttatttattaggtctttcagctataatgcaggtgttctttggctattttgctagtcatttcatcagcaattcttggctcatgtggtttatcattagtattgtacaaatggcacccgtttctgcaatggttaggatgtacatcttctttgcttctttctactacatatggaagagctatgttcatatcatggatggttgcacctcttcgacttgcatgatgtgctataagcgcaatcgtgccacacgcgttgagtgtacaactattgttaatggcatgaagagatctttctatgtctatgcaaatggaggccgtggcttctgcaagactcacaattggaattgtctcaattgtgacacattttgcactggtagtacattcattagtgatgaagttgctcgtgatttgtcactccagtttaaaagaccaatcaaccctactgaccagtcatcgtatattgttgatagtgttgctgtgaaaaatggcgcgcttcacctctactttgacaaggctggtcaaaagacctatgagagacatccgctctcccattttgtcaatttagacaatttgagagctaacaacactaaaggttcactgcctattaatgtcatagtttttgatggcaagtccaaatgcgacgagtctgcttctaagtctgcttctgtgtactacagtcagctgatgtgccaacctattctgttgcttgaccaagctcttgtatcagacgttggagatagtactgaagtttccgttaagatgtttgatgcttatgtcgacaccttttcagcaacttttagtgttcctatggaaaaacttaaggcacttgttgctacagctcacagcgagttagcaaagggtgtagctttagatggtgtcctttctacattcgtgtcagctgcccgacaaggtgttgttgataccgatgttgacacaaaggatgttattgaatgtctcaaactttcacatcactctgacttagaagtgacaggtgacagttgtaacaatttcatgctcacctataataaggttgaaaacatgacgcccagagatcttggcgcatgtattgactgtaatgcaaggcatatcaatgcccaagtagcaaaaagtcacaatgtttcactcatctggaatgtaaaagactacatgtctttatctgaacagctgcgtaaacaaattcgtagtgctgccaagaagaacaacataccttttagactaacttgtgctacaactagacaggttgtcaatgtcataactactaaaatctcactcaagggtggtaagattgttagtacttgttttaaacttatgcttaaggccacattattgtgcgttcttgctgcattggtttgttatatcgttatgccattacatacattgtcaatccatgatggttacacaaatgaaatcattggttacaaagccattcaggatggtgtcactcgtgacatcatttctactgatgattgttttgcaaataaacatgctggttttgacgcatggtttagccagcgtggtggttcatacaaaaatgacaaaagctgccctgtagtagctgctatcattacaagagagattggtttcatagtgcctggcttaccgggtactgtgctgagagcaatcaatggtgacttcttgcattttctacctcgtgtttttagtgctgttggcaacatttgctacacaccttccaaactcattgagtatagtgattttgctacctctgcttgcgttcttgctgctgagtgtacaatttttaaggatgctatgggcaaacctgtgccatattgttatgacactaatttgctagagggttctatttcttatagtgagcttcgtccagacactcgttatgtgcttatggatggttccatcatacagtttcctaacacttacctggagggttctgttagagtagtaacaacttttgatgctgagtactgtagacatggtacatgcgaaaggtcagaagtaggtatttgcctatctaccagtggtagatgggttcttaataatgagcattacagagctctatcaggagttttctgtggtgttgatgcgatgaatctcatagctaacatctttactcctcttgtgcaacctgtgggtgctttagatgtgtctgcttcagtagtggctggtggtattattgccatattggtgacttgtgctgcctactactttatgaaattcagacgtgcttttggtgagtacaaccatgttgttgctgctaatgcacttttgtttttgatgtctttcactatactctgtctggtaccagcttacagctttctgccgggagtctactcagtcttttacttgtacttgacattctatttcaccaatgatgtttcattcttggctcaccttcaatggtttgccatgttttctcctattgtgcctttttggataacagcaatctatgtattctgtatttctctgaagcactgccattggttctttaacaactatcttaggaaaagagtcatgtttaatggagttacatttagtaccttcgaggaggctgctttgtgtacctttttgctcaacaaggaaatgtacctaaaattgcgtagcgagacactgttgccacttacacagtataacaggtatcttgctctatataacaagtacaagtatttcagtggagtcttagatactaccagctatcgtgaagcagcttgctgccacttagcaaaggctctaaatgactttagcaactcaggtgctgatgttctctaccaaccaccacagacatcaatcacttctgctgttctgcagagtggttttaggaaaatggcattcccgtcaggcaaagttgaagggtgcatggtacaagtaacctgtggaactacaactcttaatggattgtggttggatgacacagtatactgtccaagacatgtcatttgcacagcagaagacatgcttaatcctaactatgaagatctgctcattcgcaaatccaaccatagctttcttgttcaggctggcaatgttcaacttcgtgttattggccattctatgcaaaattgtctgcttaggcttaaagttgatacttctaaccctaagacacccaagtataaatttgtccgtatccaacctggtcaaacattttcagttctagcatgctacaatggttcaccatctggtgtttatcagtgtgccatgagacctaatcataccattaaaggttctttccttaatggatcatgtggtagtgttggttttaacattgattatgattgcgtgtctttctgctatatgcatcatatggagcttccaacaggagtacacgctggtactgacttagaaggtaaattctatggtccatttgttgacagacaaactgcacaggctgcaggtacagacacaaccataaccttaaatgttttggcatggctgtatgctgctgttatcaatggtgataggtggtttcttaatagattcaccactactttgaatgactttaaccttgtggcaatgaagtacaactatgaacctttgacacaagatcatgttgacatattgggacctctttctgctcaaacaggaattgccgtcttagatatgtgtgctgctttgaaagagctgctgcagaatggtatgaatggtcgtactatccttggtagcactattttagaagatgagtttacaccatttgatgttgttagacaatgctctggtgttaccttccaaggtaagttcaagaaaattgttaagggcactcatcattggatgcttttaactttcttgacatcactattgattcttgttcaaagtacacagtggtcactgtttttctttgtttacgagaatgctttcttgccatttactcttggtattatggcaattgctgcatgtgctatgctgcttgttaagcataagcacgcattcttgtgcttgtttctgttaccttctcttgcaacagttgcttactttaatatggtctacatgcctgctagctgggtgatgcgtatcatgacatggcttgaattggctgacactagcttgtctggttataggcttaaggattgtgttatgtatgcttcagctttagttttgcttattctcatgacagctcgcactgtttatgatgatgctgctagacgtgtttggacactgatgaatgtcattacacttgtttacaaagtctactatggtaatgctttagatcaagctatttccatgtgggccttagttatttctgtaacctctaactattctggtgtcgttacgactatcatgtttttagctagagctatagtgtttgtgtgtgttgagtattacccattgttatttattactggcaacaccttacagtgtatcatgcttgtttattgtttcttaggctattgttgctgctgctactttggccttttctgtttactcaaccgttacttcaggcttactcttggtgtttatgactacttggtctctacacaagaatttaggtatatgaactcccaggggcttttgcctcctaagagtagtattgatgctttcaagcttaacattaagttgttgggtattggaggtaaaccatgtatcaaggttgctactgtacagtctaaaatgtctgacgtaaagtgcacatctgtggtactgctctcggttcttcaacaacttagagtagagtcatcttctaaattgtgggcacaatgtgtacaactccacaatgatattcttcttgcaaaagacacaactgaagctttcgagaagatggtttctcttttgtctgttttgctatccatgcagggtgctgtagacattaataggttgtgcgaggaaatgctcgataaccgtgctactcttcaggctattgcttcagaatttagttctttaccatcatatgccgcttatgccactgcccaggaggcctatgagcaggctgtagctaatggtgattctgaagtcgttctcaaaaagttaaagaaatctttgaatgtggctaaatctgagtttgaccgtgatgctgccatgcaacgcaagttggaaaagatggcagatcaggctatgacccaaatgtacaaacaggcaagatctgaggacaagagggcaaaagtaactagtgctatgcaaacaatgctcttcactatgcttaggaagcttgataatgatgcacttaacaacattatcaacaatgcgcgtgatggttgtgttccactcaacatcataccattgactacagcagccaaactcatggttgttgtccctgattatggtacctacaagaacacttgtgatggtaacacctttacatatgcatctgcactctgggaaatccagcaagttgttgatgcggatagcaagattgttcaacttagtgaaattaacatggacaattcaccaaatttggcttggcctcttattgttacagctctaagagccaactcagctgttaaactacagaataatgaactgagtccagtagcactacgacagatgtcctgtgcggctggtaccacacaaacagcttgtactgatgacaatgcacttgcctactataacaattcgaagggaggtaggtttgtgctggcattactatcagaccaccaagatctcaaatgggctagattccctaagagtgatggtacaggtacaatttacacagaactggaaccaccttgtaggtttgttacagacacaccaaaagggcctaaagtgaaatacttgtacttcatcaaaggcttaaacaacctaaatagaggtatggtgctgggcagtttagctgctacagtacgtcttcaggctggaaatgctacagaagtacctgccaattcaactgtgctttccttctgtgcttttgcagtagaccctgctaaagcatataaggattacctagcaagtggaggacaaccaatcaccaactgtgtgaagatgttgtgtacacacactggtacaggacaggcaattactgtaacaccagaagctaacatggaccaagagtcctttggtggtgcttcatgttgtctgtattgtagatgccacattgaccatccaaatcctaaaggattctgtgacttgaaaggtaagtacgtccaaatacctaccacttgtgctaatgacccagtgggttttacacttagaaacacagtctgtaccgtctgcggaatgtggaaaggttatggctgtagttgtgaccaactccgcgaacccttgatgcagtctgcggatgcatcaacgtttttaaacgggtttgcggtgtaagtgcagcccgtcttacaccgtgcggcacaggcactagtactgatgtcgtctacagggcttttgatatttacaacgaaaaagttgctggttttgcaaagttcctaaaaactaattgctgtcgcttccaggagaaggatgaggaaggcaatttattagactcttactttgtagttaagaggcatactatgtctaactaccaacatgaagagactatttataacttggttaaagattgtccagcggttgctgtccatgactttttcaagtttagagtagatggtgacatggtaccacatatatcacgtcagcgtctaactaaatacacaatggctgatttagtctatgctctacgtcattttgatgagggtaattgtgatacattaaaagaaatactcgtcacatacaattgctgtgatgatgattatttcaataagaaggattggtatgacttcgtagagaatcctgacatcttacgcgtatatgctaacttaggtgagcgtgtacgccaatcattattaaagactgtacaattctgcgatgctatgcgtgatgcaggcattgtaggcgtactgacattagataatcaggatcttaatgggaactggtacgatttcggtgatttcgtacaagtagcaccaggctgcggagttcctattgtggattcatattactcattgctgatgcccatcctcactttgactagggcattggctgctgagtcccatatggatgctgatctcgcaaaaccacttattaagtgggatttgctgaaatatgattttacggaagagagactttgtctcttcgaccgttattttaaatattgggaccagacataccatcccaattgtattaactgtttggatgataggtgtatccttcattgtgcaaactttaatgtgttattttctactgtgtttccacctacaagttttggaccactagtaagaaaaatatttgtagatggtgttccttttgttgtttcaactggataccattttcgtgagttaggagtcgtacataatcaggatgtaaacttacatagctcgcgtctcagtttcaaggaacttttagtgtatgctgctgatccagctatgcatgcagcttctggcaatttattgctagataaacgcactacatgcttttcagtagctgcactaacaaacaatgttgcttttcaaactgtcaaacccggtaattttaataaagacttttatgactttgctgtgtctaaaggtttctttaaggaaggaagttctgttgaactaaaacacttcttctttgctcaggatggcaacgctgctatcagtgattatgactattatcgttataatctgccaacaatgtgtgatatcagacaactcctattcgtagttgaagttgttgataaatactttgattgttacgatggtggctgtattaatgccaaccaagtaatcgttaacaatctggataaatcagctggtttcccatttaataaatggggtaaggctagactttattatgactcaatgagttatgaggatcaagatgcacttttcgcgtatactaagcgtaatgtcatccctactataactcaaatgaatcttaagtatgccattagtgcaaagaatagagctcgcaccgtagctggtgtctctatctgtagtactatgacaaatagacagtttcatcagaaattattgaagtcaatagccgccactagaggagctactgtggtaattggaacaagcaagttttacggtggctggcataatatgttaaaaactgtttacagtgatgtagaaactccacaccttatgggttgggattatccaaaatgtgacagagccatgcctaacatgcttaggataatggcctctcttgttcttgctcgcaaacataacacttgctgtaacttatcacaccgtttctacaggttagctaacgagtgtgcgcaagtattaagtgagatggtcatgtgtggcggctcactatatgttaaaccaggtggaacatcatccggtgatgctacaactgcttatgctaatagtgtctttaacatttgtcaagctgttacagccaatgtaaatgcacttctttcaactgatggtaataagatagctgacaagtatgtccgcaatctacaacacaggctctatgagtgtctctatagaaatagggatgttgatcatgaattcgtggatgagttttacgcttacctgcgtaaacatttctccatgatgattctttctgatgatgccgttgtgtgctataacagtaactatgcggctcaaggtttagtagctagcattaagaactttaaggcagttctttattatcaaaataatgtgttcatgtctgaggcaaaatgttggactgagactgaccttactaaaggacctcacgaattttgctcacagcatacaatgctagttaaacaaggagatgattacgtgtacctgccttacccagatccatcaagaatattaggcgcaggctgttttgtcgatgatattgtcaaaacagatggtacacttatgattgaaaggttcgtgtcactggctattgatgcttacccacttacaaaacatcctaatcaggagtatgctgatgtctttcacttgtatttacaatacattagaaagttacatgatgagcttactggccacatgttggacatgtattccgtaatgctaactaatgataacacctcacggtactgggaacctgagttttatgaggctatgtacacaccacatacagtcttgcaggctgtaggtgcttgtgtattgtgcaattcacagacttcacttcgttgcggtgcctgtattaggagaccattcctatgttgcaagtgctgctatgaccatgtcatttcaacatcacacaaattagtgttgtctgttaatccctatgtttgcaatgccccaggttgtgatgtcactgatgtgacacaactgtatctaggaggtatgagctattattgcaagtcacataagcctcccattagttttccattatgtgctaatggtcaggtttttggtttatacaaaaacacatgtgtaggcagtgacaatgtcactgacttcaatgcgatagcaacatgtgattggactaatgctggcgattacatacttgccaacacttgtactgagagactcaagcttttcgcagcagaaacgctcaaagccactgaggaaacatttaagctgtcatatggtattgccactgtacgcgaagtactctctgacagagaattgcatctttcatgggaggttggaaaacctagaccaccattgaacagaaactatgtctttactggttaccgtgtaactaaaaatagtaaagtacagattggagagtacacctttgaaaaaggtgactatggtgatgctgttgtgtacagaggtactacgacatacaagttgaatgttggtgattactttgtgttgacatctcacactgtaatgccacttagtgcacctactctagtgccacaagagcactatgtgagaattactggcttgtacccaacactcaacatctcagatgagttttctagcaatgttgcaaattatcaaaaggtcggcatgcaaaagtactctacactccaaggaccacctggtactggtaagagtcattttgccatcggacttgctctctattacccatctgctcgcatagtgtatacggcatgctctcatgcagctgttgatgccctatgtgaaaaggcattaaaatatttgcccatagataaatgtagtagaatcatacctgcgcgtgcgcgcgtagagtgttttgataaattcaaagtgaattcaacactagaacagtatgttttctgcactgtaaatgcattgccagaaacaactgctgacattgtagtctttgatgaaatctctatggctactaattatgacttgagtgttgtcaatgctagacttcgtgcaaaacactacgtctatattggcgatcctgctcaattaccagccccccgcacattgctgactaaaggcacactagaaccagaatattttaattcagtgtgcagacttatgaaaacaataggtccagacatgttccttggaacttgtcgccgttgtcctgctgaaattgttgacactgtgagtgctttagtttatgacaataagctaaaagcacacaaggagaagtcagctcaatgcttcaaaatgttctacaaaggtgttattacacatgatgtttcatctgcaatcaacagacctcaaataggcgttgtaagagaatttcttacacgcaatcctgcttggagaaaagctgtttttatctcaccttataattcacagaacgctgtagcttcaaaaatcttaggattgcctacgcagactgttgattcatcacagggttctgaatatgactatgtcatattcacacaaactactgaaacagcacactcttgtaatgtcaaccgcttcaatgtggctatcacaagggcaaaaattggcattttgtgcataatgtctgatagagatctttatgacaaactgcaatttacaagtctagaaataccacgtcgcaatgtggctacattacaagcagaaaatgtaactggactttttaaggactgtagtaagatcattactggtcttcatcctacacaggcacctacacacctcagcgttgatataaagttcaagactgaaggattatgtgttgacataccaggcataccaaaggacatgacctaccgtagactcatctctatgatgggtttcaaaatgaattaccaagtcaatggttaccctaatatgtttatcacccgcgaagaagctattcgtcacgttcgtgcgtggattggctttgatgtagagggctgtcatgcaactagagatgctgtgggtactaacctacctctccagctaggattttctacaggtgttaacttagtagctgtaccgactggttatgttgacactgaaaataacacagaattcaccagagttaatgcaaaacctccaccaggtgaccagtttaaacatcttataccactcatgtataaaggcttgccctggaatgtagtgcgtattaagatagtacaaatgctcagtgatacactgaaaggattgtcagacagagtcgtgttcgtcctttgggcgcatggctttgagcttacatcaatgaagtactttgtcaagattggacctgaaagaacgtgttgtctgtgtgacaaacgtgcaacttgcttttctacttcatcagatacttatgcctgctggaatcattctgtgggttttgactatgtctataacccatttatgattgatgttcagcagtggggctttacgggtaaccttcagagtaaccatgaccaacattgccaggtacatggaaatgcacatgtggctagttgtgatgctatcatgactagatgtttagcagtccatgagtgctttgttaagcgcgttgattggtctgttgaataccctattataggagatgaactgagggttaattctgcttgcagaaaagtacaacacatggttgtgaagtctgcattgcttgctgataagtttccagttcttcatgacattggaaatccaaaggctatcaagtgtgtgcctcaggctgaagtagaatggaagttctacgatgctcagccatgtagtgacaaagcttacaaaatagaggaactcttctattcttatgctacacatcacgataaattcactgatggtgtttgtttgttttggaattgtaacgttgatcgttacccagccaatgcaattgtgtgtaggtttgacacaagagtcttgtcaaacttgaacttaccaggctgtgatggtggtagtttgtatgtgaataagcatgcattccacactccagctttcgataaaagtgcatttactaatttaaagcaattgcctttcttttactattctgatagtccttgtgagtctcatggcaaacaagtagtgtcggatattgattatgttccactcaaatctgctacgtgtattacacgatgcaatttaggtggtgctgtttgcagacaccatgcaaatgagtaccgacagtacttggatgcatataatatgatgatttctgctggatttagcctatggatttacaaacaatttgatacttataacctgtggaatacatttaccaggttacagagtttagaaaatgtggcttataatgttgttaataaaggacactttgatggacacgccggcgaagcacctgtttccatcattaataatgctgtttacacaaaggtagatggtattgatgtggagatctttgaaaataagacaacacttcctgttaatgttgcatttgagctttgggctaagcgtaacattaaaccagtgccagagattaagatactcaataatttgggtgttgatatcgctgctaatactgtaatctgggactacaaaagagaagccccagcacatgtgtctacaataggtgtctgcacaatgactgacattgccaagaaacctactgagagtgcttgttcttcacttactgtcttgtttgatggtagagtggaaggacaggtagacctttttagaaacgcccgtaatggtgttttaataacagaaggttcagtcaaaggtctaacaccttcaaagggaccagcacaagctagcgtcaatggagtcacattaattggagaatcagtaaaaacacagtttaactactttaagaaagtagacggcattattcaacagttgcctgaaacctactttactcagagcagagacttagaggattttaagcccagatcacaaatggaaactgactttctcgagctcgctatggatgaattcatacagcgatataagctcgagggctatgccttcgaacacatcgtttatggagatttcagtcatggacaacttggcggtcttcatttaatgataggcttagccaagcgctcacaagattcaccacttaaattagaggattttatccctatggacagcacagtgaaaaattacttcataacagatgcgcaaacaggttcatcaaaatgtgtgtgttctgtgattgatcttttacttgatgactttgtcgagataataaagtcacaagatttgtcagtgatttcaaaagtggtcaaggttacaattgactatgctgaaatttcattcatgctttggtgtaaggatggacatgttgaaaccttctacccaaaactacaagcaagtcaagcgtggcaaccaggtgttgcgatgcctaacttgtacaagatgcaaagaatgcttcttgaaaagtgtgaccttcagaattatggtgaaaatgctgttataccaaaaggaataatgatgaatgtcgcaaagtatactcaactgtgtcaatacttaaatacacttactttagctgtaccctacaacatgagagttattcactttggtgctggctctgataaaggagttgcaccaggtacagctgtgctcagacaatggttgccaactggcacactacttgtcgattcagatcttaatgacttcgtctccgacgcagattctactttaattggagactgtgcaacagtacatacggctaataaatgggaccttattattagcgatatgtatgaccctaggaccaaacatgtgacaaaagagaatgactctaaagaagggtttttcacttatctgtgtggatttataaagcaaaaactagccctgggtggttctatagctgtaaagataacagagcattcttggaatgctgacctttacaagcttatgggccatttctcatggtggacagcttttgttacaaatgtaaatgcatcatcatcggaagcatttttaattggggctaactatcttggcaagccgaaggaacaaattgatggctataccatgcatgctaactacattttctggaggaacacaaatcctatccagttgtcttcctattcactctttgacatgagcaaatttcctcttaaattaagaggaactgctgtaatgtctcttaaggagaatcaaatcaatgatatgatttattctcttctggaaaaaggtaggcttatcattagagaaaacaacagagttgtggtttcaagtgatattcttgttaacaactaaacgaacatgtttattttcttattatttcttactctcactagtggtagtgaccttgaccggtgcaccacttttgatgatgttcaagctcctaattacactcaacatacttcatctatgaggggggtttactatcctgatgaaatttttagatcagacactctttatttaactcaggatttatttcttccattttattctaatgttacagggtttcatactattaatcatacgtttgacaaccctgtcataccttttaaggatggtatttattttgctgccacagagaaatcaaatgttgtccgtggttgggtttttggttctaccatgaacaacaagtcacagtcggtgattattattaacaattctactaatgttgttatacgagcatgtaactttgaattgtgtgacaaccctttctttgctgtttctaaacccatgggtacacagacacatactatgatattcgataatgcatttaattgcactttcgagtacatatctgatgccttttcgcttgatgtttcagaaaagtcaggtaattttaaacacttacgagagtttgtgtttaaaaataaagatgggtttctctatgtttataagggctatcaacctatagatgtagttcgtgatctaccttctggttttaacactttgaaacctatttttaagttgcctcttggtattaacattacaaattttagagccattcttacagccttttcacctgctcaagacacttggggcacgtcagctgcagcctattttgttggctatttaaagccaactacatttatgctcaagtatgatgaaaatggtacaatcacagatgctgttgattgttctcaaaatccacttgctgaactcaaatgctctgttaagagctttgagattgacaaaggaatttaccagacctctaatttcagggttgttccctcaggagatgttgtgagattccctaatattacaaacttgtgtccttttggagaggtttttaatgctactaaattcccttctgtctatgcatgggagagaaaaaaaatttctaattgtgttgctgattactctgtgctctacaactcaacatttttttcaacctttaagtgctatggcgtttctgccactaagttgaatgatctttgcttctccaatgtctatgcagattcttttgtagtcaagggagatgatgtaagacaaatagcgccaggacaaactggtgttattgctgattataattataaattgccagatgatttcatgggttgtgtccttgcttggaatactaggaacattgatgctacttcaactggtaattataattataaatataggtatcttagacatggcaagcttaggccctttgagagagacatatctaatgtgcctttctcccctgatggcaaaccttgcaccccacctgctcttaattgttattggccattaaatgattatggtttttacaccactactggcattggctaccaaccttacagagttgtagtactttcttttgaacttttaaatgcaccggccacggtttgtggaccaaaattatccactgaccttattaagaaccagtgtgtcaattttaattttaatggactcactggtactggtgtgttaactccttcttcaaagagatttcaaccatttcaacaatttggccgtgatgtttctgatttcactgattccgttcgagatcctaaaacatctgaaatattagacatttcaccttgctcttttgggggtgtaagtgtaattacacctggaacaaatgcttcatctgaagttgctgttctatatcaagatgttaactgcactgatgtttctacagcaattcatgcagatcaactcacaccagcttggcgcatatattctactggaaacaatgtattccagactcaagcaggctgtcttataggagctgagcatgtcgacacttcttatgagtgcgacattcctattggagctggcatttgtgctagttaccatacagtttctttattacgtagtactagccaaaaatctattgtggcttatactatgtctttaggtgctgatagttcaattgcttactctaataacaccattgctatacctactaacttttcaattagcattactacagaagtaatgcctgtttctatggctaaaacctccgtagattgtaatatgtacatctgcggagattctactgaatgtgctaatttgcttctccaatatggtagcttttgcacacaactaaatcgtgcactctcaggtattgctgctgaacaggatcgcaacacacgtgaagtgttcgctcaagtcaaacaaatgtacaaaaccccaactttgaaatattttggtggttttaatttttcacaaatattacctgaccctctaaagccaactaagaggtcttttattgaggacttgctctttaataaggtgacactcgctgatgctggcttcatgaagcaatatggcgaatgcctaggtgatattaatgctagagatctcatttgtgcgcagaagttcaatggacttacagtgttgccacctctgctcactgatgatatgattgctgcctacactgctgctctagttagtggtactgccactgctggatggacatttggtgctggcgctgctcttcaaataccttttgctatgcaaatggcatataggttcaatggcattggagttacccaaaatgttctctatgagaaccaaaaacaaatcgccaaccaatttaacaaggcgattagtcaaattcaagaatcacttacaacaacatcaactgcattgggcaagctgcaagacgttgttaaccagaatgctcaagcattaaacacacttgttaaacaacttagctctaattttggtgcaatttcaagtgtgctaaatgatatcctttcgcgacttgataaagtcgaggcggaggtacaaattgacaggttaattacaggcagacttcaaagccttcaaacctatgtaacacaacaactaatcagggctgctgaaatcagggcttctgctaatcttgctgctactaaaatgtctgagtgtgttcttggacaatcaaaaagagttgacttttgtggaaagggctaccaccttatgtccttcccacaagcagccccgcatggtgttgtcttcctacatgtcacgtatgtgccatcccaggagaggaacttcaccacagcgccagcaatttgtcatgaaggcaaagcatacttccctcgtgaaggtgtttttgtgtttaatggcacttcttggtttattacacagaggaacttcttttctccacaaataattactacagacaatacatttgtctcaggaaattgtgatgtcgttattggcatcattaacaacacagtttatgatcctctgcaacctgagcttgactcattcaaagaagagctggacaagtacttcaaaaatcatacatcaccagatgttgatcttggcgacatttcaggcattaacgcttctgtcgtcaacattcaaaaagaaattgaccgcctcaatgaggtcgctaaaaatttaaatgaatcactcattgaccttcaagaattgggaaaatatgagcaatatattaaatggccttggtatgtttggctcggcttcattgctggactaattgccatcgtcatggttacaatcttgctttgttgcatgactagttgttgcagttgcctcaagggtgcatgctcttgtggttcttgctgcaagtttgatgaggatgactctgagccagttctcaagggtgtcaaattacattacacataaacgaacttatggatttgtttatgagattttttactcttggatcaattactgcacagccagtaaaaattgacaatgcttctcctgcaagtactgttcatgctacagcaacgataccgctacaagcctcactccctttcggatggcttgttattggcgttgcatttcttgctgtttttcagagcgctaccaaaataattgcgctcaataaaagatggcagctagccctttataagggcttccagttcatttgcaatttactgctgctatttgttaccatctattcacatcttttgcttgtcgctgcaggtatggaggcgcaatttttgtacctctatgccttgatatattttctacaatgcatcaacgcatgtagaattattatgagatgttggctttgttggaagtgcaaatcccagaacccattactttatgatgccaactactttgtttgctggcacacacataactatgactactgtataccatataacagtgtcacagatacaattgtcgttactgaaggtgacggcatttcaacaccaaaactcaaagaagactaccaaattggtggttattctgaggataggcactcaggtgttaaagactatgtcgttgtacatggctatttcaccgaagtttactaccagcttgagtctacacaaattactacagacactggtattgaaaatgctacattcttcatctttaacaagcttgttaaagacccaccgaatgtgcaaatacacacaatcgacggctcttcaggagttgctaatccagcaatggatcccatttatgatgagccgacgacgactactagcgtgcctttgtaagcacaagaaagtgagtacgaacttatgtactcattcgtttcggaagaaacaggtacgttaatagttaatagcgtacttctttttcttgctttcgtggtattcttgctagtcacactagccatccttactgcgcttcgattgtgtgcgtactgctgcaatattgttaacgtgagtttagtaaaaccaacggtttacgtctactcgcgtgttaaaaatctgaactcttctgaaggagttcctgatcttctggtctaaacgaactaactattattattattctgtttggaactttaacattgcttatcatggcagacaacggtactattaccgttgaggagcttaaacaactcctggaacaatggaacctagtaataggtttcctattcctagcctggattatgttactacaatttgcctattctaatcggaacaggtttttgtacataataaagcttgttttcctctggctcttgtggccagtaacacttgcttgttttgtgcttgctgctgtctacagaattaattgggtgactggcgggattgcgattgcaatggcttgtattgtaggcttgatgtggcttagctacttcgttgcttccttcaggctgtttgctcgtacccgctcaatgtggtcattcaacccagaaacaaacattcttctcaatgtgcctctccgggggacaattgtgaccagaccgctcatggaaagtgaacttgtcattggtgctgtgatcattcgtggtcacttgcgaatggccggacactccctagggcgctgtgacattaaggacctgccaaaagagatcactgtggctacatcacgaacgctttcttattacaaattaggagcgtcgcagcgtgtaggcactgattcaggttttgctgcatacaaccgctaccgtattggaaactataaattaaatacagaccacgccggtagcaacgacaatattgctttgctagtacagtaagtgacaacagatgtttcatcttgttgacttccaggttacaatagcagagatattgattatcattatgaggactttcaggattgctatttggaatcttgacgttataataagttcaatagtgagacaattatttaagcctctaactaagaagaattattcggagttagatgatgaagaacttatggagttagattatccataaaacgaacatgaaaattattctcttcctgacattgattgtatttacatcttgcgagctatatcactatcaggagtgtgttagaggtacgactgtactactaaaagaaccttgcccatcaggaacatacgagggcaattcaccatttcaccctcttgctgacaataaatttgcactaacttgcactagcacacactttgcttttgcttgtgctgacggtactcgacatacctatcagctgcgtgcaagatcagtttcaccaaaacttttcatcagacaagaggaggttcaacaagagctctactcgccactttttctcattgttgctgctctagtatttttaatactttgcttcaccattaagagaaagacagaatgaatgagctcactttaattgacttctatttgtgctttttagcctttctgctattccttgttttaataatgcttattatattttggttttcactcgaaatccaggatctagaagaaccttgtaccaaagtctaaacgaacatgaaacttctcattgttttgacttgtatttctctatgcagttgcatacgcactgtagtacagcgctgtgcatctaataaacctcatgtgcttgaagatccttgtaaggtacaacactaggggtaatacttatagcactgcttggctttgtgctctaggaaaggttttaccttttcatagatggcacactatggttcaaacatgcacacctaatgttactatcaactgtcaagatccagctggtggtgcgcttatagctaggtgttggtaccttcatgaaggtcaccaaactgctgcatttagagacgtacttgttgttttaaataaacgaacaaattaaaatgtctgataatggaccccaatcaaaccaacgtagtgccccccgcattacatttggtggacccacagattcaactgacaataaccagaatggaggacgcaatggggcaaggccaaaacagcgccgaccccaaggtttacccaataatactgcgtcttggttcacagctctcactcagcatggcaaggaggaacttagattccctcgaggccagggcgttccaatcaacaccaatagtggtccagatgaccaaattggctactaccgaagagctacccgacgagttcgtggtggtgacggcaaaatgaaagagctcagccccagatggtacttctattacctaggaactggcccagaagcttcacttccctacggcgctaacaaagaaggcatcgtatgggttgcaactgagggagccttgaatacacccaaagaccacattggcacccgcaatcctaataacaatgctgccaccgtgctacaacttcctcaaggaacaacattgccaaaaggcttctacgcagagggaagcagaggcggcagtcaagcctcttctcgctcctcatcacgtagtcgcggtaattcaagaaattcaactcctggcagcagtaggggaaattctcctgctcgaatggctagcggaggtggtgaaactgccctcgcgctattgctgctagacagattgaaccagcttgagagcaaagtttctggtaaaggccaacaacaacaaggccaaactgtcactaagaaatctgctgctgaggcatctaaaaagcctcgccaaaaacgtactgccacaaaacagtacaacgtcactcaagcatttgggagacgtggtccagaacaaacccaaggaaatttcggggaccaagacctaatcagacaaggaactgattacaaacattggccgcaaattgcacaatttgctccaagtgcctctgcattctttggaatgtcacgcattggcatggaagtcacaccttcgggaacatggctgacttatcatggagccattaaattggatgacaaagatccacaattcaaagacaacgtcatactgctgaacaagcacattgacgcatacaaaacattcccaccaacagagcctaaaaaggacaaaaagaaaaagactgatgaagctcagcctttgccgcagagacaaaagaagcagcccactgtgactcttcttcctgcggctgacatggatgatttctccagacaacttcaaaattccatgagtggagcttctgctgattcaactcaggcataaacactcatgatgaccacacaaggcagatgggctatgtaaacgttttcgcaattccgtttacgatacatagtctactcttgtgcagaatgaattctcgtaactaaacagcacaagtaggtttagttaactttaatctcacatagcaatctttaatcaatgtgtaacattagggaggacttgaaagagccaccacattttcatcgaggccacgcggagtacgatcgagggtacagtgaataatgctagggagagctgcctatatggaagagccctaatgtgtaaaattaattttagtagtgctatccccatgtgattttaatagcttcttaggagaatgacaaaaaaaaaaaaaaaaa

SEQ ID NO: 29754 - DNA, 158 bp, SARS Coronavirus
cagagccatgcctaacatgcttaggataatggcctctcttgttcttgctcgcaaacataacacttgctgtaacttatcacaccgtttctacaggttagctaacgagtgtgcgcaagtattaagtgagatggtcatgtgtggcggctcactatatgtta

SEQ ID NO: 29755 - DNA, 29711 bp, SARS Coronavirus
tacccaggaaaagccaaccaacctcgatctcttgtagatctgttctctaaacgaactttaaaatctgtgtagctgtcgctcggctgcatgcctagtgcacctacgcagtataaacaataataaattttactgtcgttgacaagaaacgagtaactcgtccctcttctgcagactgcttacggtttcgtccgtgttgcagtcgatcatcagcatacctaggtttcgtccgggtgtgaccgaaaggtaagatggagagccttgttcttggtgtcaacgagaaaacacacgtccaactcagtttgcctgtccttcaggttagagacgtgctagtgcgtggcttcggggactctgtggaagaggccctatcggaggcacgtgaacacctcaaaaatggcacttgtggtctagtagagctggaaaaaggcgtactgccccagcttgaacagccctatgtgttcattaaacgttctgatgccttaagcaccaatcacggccacaaggtcgttgagctggttgcagaaatggacggcattcagtacggtcgtagcggtataacactgggagtactcgtgccacatgtgggcgaaaccccaattgcataccgcaatgttcttcttcgtaagaacggtaataagggagccggtggtcatagctatggcatcgatctaaagtcttatgacttaggtgacgagcttggcactgatcccattgaagattatgaacaaaactggaacactaagcatggcagtggtgcactccgtgaactcactcgtgagctcaatggaggtgcagtcactcgctatgtcgacaacaatttctgtggcccagatgggtaccctcttgattgcatcaaagattttctcgcacgcgcgggcaagtcaatgtgcactctttccgaacaacttgattacatcgagtcgaagagaggtgtctactgctgccgtgaccatgagcatgaaattgcctggttcactgagcgctctgataagagctacgagcaccagacacccttcgaaattaagagtgccaagaaatttgacactttcaaaggggaatgcccaaagtttgtgtttcctcttaactcaaaagtcaaagtcattcaaccacgtgttgaaaagaaaaagactgagggtttcatggggcgtatacgctctgtgtaccctgttgcatctccacaggagtgtaacaatatgcacttgtctaccttgatgaaatgtaatcattgcgatgaagtttcatggcagacgtgcgactttctgaaagccacttgtgaacattgtggcactgaaaatttagttattgaaggacctactacatgtgggtacctacctactaatgctgtagtgaaaatgccatgtcctgcctgtcaagacccagagattggacctgagcatagtgttgcagattatcacaaccactcaaacattgaaactcgactccgcaagggaggtaggactagatgttttggaggctgtgtgtttgcctatgttggctgctataataagcgtgcctactgggttcctcgtgctagtgctgatattggctcaggccatactggcattactggtgacaatgtggagaccttgaatgaggatctccttgagatactgagtcgtgaacgtgttaacattaacattgttggcgattttcatttgaatgaagaggttgccatcattttggcatctttctctgcttctacaagtgcctttattgacactataaagagtcttgattacaagtctttcaaaaccattgttgagtcctgcggtaactataaagttaccaagggaaagcccgtaaaaggtgcttggaacattggacaacagagatcagttttaacaccactgtgtggttttccctcacaggctgctggtgttatcagatcaatttttgcgcgcacacttgatgcagcaaaccactcaattcctgatttgcaaagagcagctgtcaccatacttgatggtatttctgaacagtcattacgtcttgtcgacgccatggtttatacttcagacctgctcaccaacagtgtcattattatggcatatgtaactggtggtcttgtacaacagacttctcagtggttgtctaatcttttgggcactactgttgaaaaactcaggcctatctttgaatggattgaggcgaaacttagtgcaggagttgaatttctcaaggatgcttgggagattctcaaatttctcattacaggtgtttttgacatcgtcaagggtcaaatacaggttgcttcagataacatcaaggattgtgtaaaatgcttcattgatgttgttaacaaggcactcgaaatgtgcattgatcaagtcactatcgctggcgcaaagttgcgatcactcaacttaggtgaagtcttcatcgctcaaagcaagggactttaccgtcagtgtatacgtggcaaggagcagctgcaactactcatgcctcttaaggcaccaaaagaagtaacctttcttgaaggtgattcacatgacacagtacttacctctgaggaggttgttctcaagaacggtgaactcgaagcactcgagacgcccgttgatagcttcacaaatggagctatcgttggcacaccagtctgtgtaaatggcctcatgctcttagagattaaggacaaagaacaatactgcgcattgtctcctggtttactggctacaaacaatgtctttcgcttaaaagggggtgcaccaattaaaggtgtaacctttggagaagatactgtttgggaagttcaaggttacaagaatgtgagaatcacatttgagcttgatgaacgtgttgacaaagtgcttaatgaaaagtgctctgtctacactgttgaatccggtaccgaagttactgagtttgcatgtgttgtagcagaggctgttgtgaagactttacaaccagtttctgatctccttaccaacatgggtattgatcttgatgagtggagtgtagctacattctacttatttgatgatgctggtgaagaaaacttttcatcacgtatgtattgttccttttaccctccagatgaggaagaagaggacgatgcagagtgtgaggaagaagaaattgatgaaacctgtgaacatgagtacggtacagaggatgattatcaaggtctccctctggaatttggtgcctcagctgaaacagttcgagttgaggaagaagaagaggaagactggctggatgatactactgagcaatcagagattgagccagaaccagaacctacacctgaagaaccagttaatcagtttactggttatttaaaacttactgacaatgttgccattaaatgtgttgacatcgttaaggaggcacaaagtgctaatcctatggtgattgtaaatgctgctaacatacacctgaaacatggtggtggtgtagcaggtgcactcaacaaggcaaccaatggtgccatgcaaaaggagagtgatgattacattaagctaaatggccctcttacagtaggagggtcttgtttgctttctggacataatcttgctaagaagtgtctgcatgttgttggacctaacctaaatgcaggtgaggacatccagcttcttaaggcagcatatgaaaatttcaattcacaggacatcttacttgcaccattgttgtcagcaggcatatttggtgctaaaccacttcagtctttacaagtgtgcgtgcagacggttcgtacacaggtttatattgcagtcaatgacaaagctctttatgagcaggttgtcatggattatcttgataacctgaagcctagagtggaagcacctaaacaagaggagccaccaaacacagaagattccaaaactgaggagaaatctgtcgtacagaagcctgtcgatgtgaagccaaaaattaaggcctgcattgatgaggttaccacaacactggaagaaactaagtttcttaccaataagttactcttgtttgctgatatcaatggtaagctttaccatgattctcagaacatgcttagaggtgaagatatgtctttccttgagaaggatgcaccttacatggtaggtgatgttatcactagtggtgatatcacttgtgttgtaataccctccaaaaaggctggtggcactactgagatgctctcaagagctttgaagaaagtgccagttgatgagtatataaccacgtaccctggacaaggatgtgctggttatacacttgaggaagctaagactgctcttaagaaatgcaaatctgcattttatgtactaccttcagaagcacctaatgctaaggaagagattctaggaactgtatcctggaatttgagagaaatgcttgctcatgctgaagagacaagaaaattaatgcctatatgcatggatgttagagccataatggcaaccatccaacgtaagtataaaggaattaaaattcaagagggcatcgttgactatggtgtccgattcttcttttatactagtaaagagcctgtagcttctattattacgaagctgaactctctaaatgagccgcttgtcacaatgccaattggttatgtgacacatggttttaatcttgaagaggctgcgcgctgtatgcgttctcttaaagctcctgccgtagtgtcagtatcatcaccagatgctgttactacatataatggatacctcacttcgtcatcaaagacatctgaggagcactttgtagaaacagtttctttggctggctcttacagagattggtcctattcaggacagcgtacagagttaggtgttgaatttcttaagcgtggtgacaaaattgtgtaccacactctggagagccccgtcgagtttcatcttgacggtgaggttctttcacttgacaaactaaagagtctcttatccctgcgggaggttaagactataaaagtgttcacaactgtggacaacactaatctccacacacagcttgtggatatgtctatgacatatggacagcagtttggtccaacatacttggatggtgctgatgttacaaaaattaaacctcatgtaaatcatgagggtaagactttctttgtactacctagtgatgacacactacgtagtgaagctttcgagtactaccatactcttgatgagagttttcttggtaggtacatgtctgctttaaaccacacaaagaaatggaaatttcctcaagttggtggtttaacttcaattaaatgggctgataacaattgttatttgtctagtgttttattagcacttcaacagcttgaagtcaaattcaatgcaccagcacttcaagaggcttattatagagcccgtgctggtgatgctgctaacttttgtgcactcatactcgcttacagtaataaaactgttggcgagcttggtgatgtcagagaaactatgacccatcttctacagcatgctaatttggaatctgcaaagcgagttcttaatgtggtgtgtaaacattgtggtcagaaaactactaccttaacgggtgtagaagctgtgatgtatatgggtactctatcttatgataatcttaagacaggtgtttccattccatgtgtgtgtggtcgtgatgctacacaatatctagtacaacaagagtcttcttttgttatgatgtctgcaccacctgctgagtataaattacagcaaggtacattcttatgtgcgaatgagtacactggtaactatcagtgtggtcattacactcatataactgctaaggagaccctctatcgtattgacggagctcaccttacaaagatgtcagagtacaaaggaccagtgactgatgttttctacaaggaaacatcttacactacaaccatcaagcctgtgtcgtataaactcgatggagttacttacacagagattgaaccaaaattggatgggtattataaaaaggataatgcttactatacagagcagcctatagaccttgtaccaactcaaccattaccaaatgcgagttttgataatttcaaactcacatgttctaacacaaaatttgctgatgatttaaatcaaatgacaggcttcacaaagccagcttcacgagagctatctgtcacattcttcccagacttgaatggcgatgtagtggctattgactatagacactattcagcgagtttcaagaaaggtgctaaattactgcataagccaattgtttggcacattaaccaggctacaaccaagacaacgttcaaaccaaacacttggtgtttacgttgtctttggagtacaaagccagtagatacttcaaattcatttgaagttctggcagtagaagacacacaaggaatggacaatcttgcttgtgaaagtcaacaacccacctctgaagaagtagtggaaaatcctaccatacagaaggaagtcatagagtgtgacgtgaaaactaccgaagttgtaggcaatgtcatacttaaaccatcagatgaaggtgttaaagtaacacaagagttaggtcatgaggatcttatggctgcttatgtggaaaacacaagcattaccattaagaaacctaatgagctttcactagccttaggtttaaaaacaattgccactcatggtattgctgcaattaatagtgttccttggagtaaaattttggcttatgtcaaaccattcttaggacaagcagcaattacaacatcaaattgcgctaagagattagcacaacgtgtgtttaacaattatatgccttatgtgtttacattattgttccaattgtgtacttttactaaaagtaccaattctagaattagagcttcactacctacaactattgctaaaaatagtgttaagagtgttgctaaattatgtttggatgccggcattaattatgtgaagtcacccaaattttctaaattgttcacaatcgctatgtggctattgttgttaagtatttgcttaggttctctaatctgtgtaactgctgcttttggtgtactcttatctaattttggtgctccttcttattgtaatggcgttagagaattgtatcttaattcgtctaacgttactactatggatttctgtgaaggttcttttccttgcagcatttgtttaagtggattagactcccttgattcttatccagctcttgaaaccattcaggtgacgatttcatcgtacaagctagacttgacaattttaggtctggccgctgagtgggttttggcatatatgttgttcacaaaattcttttatttattaggtctttcagctataatgcaggtgttctttggctattttgctagtcatttcatcagcaattcttggctcatgtggtttatcattagtattgtacaaatggcacccgtttctgcaatggttaggatgtacatcttctttgcttctttctactacatatggaagagctatgttcatatcatggatggttgcacctcttcgacttgcatgatgtgctataagcgcaatcgtgccacacgcgttgagtgtacaactattgttaatggcatgaagagatctttctatgtctatgcaaatggaggccgtggcttctgcaagactcacaattggaattgtctcaattgtgacacattttgcactggtagtacattcattagtgatgaagttgctcgtgatttgtcactccagtttaaaagaccaatcaaccctactgaccagtcatcgtatattgttgatagtgttgctgtgaaaaatggcgcgcttcacctctactttgacaaggctggtcaaaagacctatgagagacatccgctctcccattttgtcaatttagacaatttgagagctaacaacactaaaggttcactgcctattaatgtcatagtttttgatggcaagtccaaatgcgacgagtctgcttctaagtctgcttctgtgtactacagtcagctgatgtgccaacctattctgttgcttgaccaagctcttgtatcagacgttggagatagtactgaagtttccgttaagatgtttgatgcttatgtcgacaccttttcagcaacttttagtgttcctatggaaaaacttaaggcacttgttgctacagctcacagcgagttagcaaagggtgtagctttagatggtgtcctttctacattcgtgtcagctgcccgacaaggtgttgttgataccgatgttgacacaaaggatgttattgaatgtctcaaactttcacatcactctgacttagaagtgacaggtgacagttgtaacaatttcatgctcacctataataaggttgaaaacatgacgcccagagatcttggcgcatgtattgactgtaatgcaaggcatatcaatgcccaagtagcaaaaagtcacaatgtttcactcatctggaatgtaaaagactacatgtctttatctgaacagctgcgtaaacaaattcgtagtgctgccaagaagaacaacataccttttagactaacttgtgctacaactagacaggttgtcaatgtcataactactaaaatctcactcaagggtggtaagattgttagtacttgttttaaacttatgcttaaggccacattattgtgcgttcttgctgcattggtttgttatatcgttatgccagtacatacattgtcaatccatgatggttacacaaatgaaatcattggttacaaagccattcaggatggtgtcactcgtgacatcatttctactgatgattgttttgcaaataaacatgctggttttgacgcatggtttagccagcgtggtggttcatacaaaaatgacaaaagctgccctgtagtagctgctatcattacaagagagattggtttcatagtgcctggcttaccgggtactgtgctgagagcaatcaatggtgacttcttgcattttctacctcgtgtttttagtgctgttggcaacatttgctacacaccttccaaactcattgagtatagtgattttgctacctctgcttgcgttcttgctgctgagtgtacaatttttaaggatgctatgggcaaacctgtgccatattgttatgacactaatttgctagagggttctatttcttatagtgagcttcgtccagacactcgttatgtgcttatggatggttccatcatacagtttcctaacacttacctggagggttctgttagagtagtaacaacttttgatgctgagtactgtagacatggtacatgcgaaaggtcagaagtaggtatttgcctatctaccagtggtagatgggttcttaataatgagcattacagagctctatcaggagttttctgtggtgttgatgcgatgaatctcatagctaacatctttactcctcttgtgcaacctgtgggtgctttagatgtgtctgcttcagtagtggctggtggtattattgccatattggtgacttgtgctgcctactactttatgaaattcagacgtgtttttggtgagtacaaccatgttgttgctgctaatgcacttttgtttttgatgtctttcactatactctgtctggtaccagcttacagctttctgccgggagtctactcagtcttttacttgtacttgacattctatttcaccaatgatgtttcattcttggctcaccttcaatggtttgccatgttttctcctattgtgcctttttggataacagcaatctatgtattctgtatttctctgaagcactgccattggttctttaacaactatcttaggaaaagagtcatgtttaatggagttacatttagtaccttcgaggaggctgctttgtgtacctttttgctcaacaaggaaatgtacctaaaattgcgtagcgagacactgttgccacttacacagtataacaggtatcttgctctatataacaagtacaagtatttcagtggagccttagatactaccagctatcgtgaagcagcttgctgccacttagcaaaggctctaaatgactttagcaactcaggtgctgatgttctctaccaaccaccacagacatcaatcacttctgctgttctgcagagtggttttaggaaaatggcattcccgtcaggcaaagttgaagggtgcatggtacaagtaacctgtggaactacaactcttaatggattgtggttggatgacacagtatactgtccaagacatgtcatttgcacagcagaagacatgcttaatcctaactatgaagatctgctcattcgcaaatccaaccatagctttcttgttcaggctggcaatgttcaacttcgtgttattggccattctatgcaaaattgtctgcttaggcttaaagttgatacttctaaccctaagacacccaagtataaatttgtccgtatccaacctggtcaaacattttcagttctagcatgctacaatggttcaccatctggtgtttatcagtgtgccatgagacctaatcataccattaaaggttctttccttaatggatcatgtggtagtgttggttttaacattgattatgattgcgtgtctttctgctatatgcatcatatggagcttccaacaggagtacacgctggtactgacttagaaggtaaattctatggtccatttgttgacagacaaactgcacaggctgcaggtacagacacaaccataacattaaatgttttggcatggctgtatgctgctgttatcaatggtgataggtggtttcttaatagattcaccactactttgaatgactttaaccttgtggcaatgaagtacaactatgaacctttgacacaagatcatgttgacatattgggacctctttctgctcaaacaggaattgccgtcttagatatgtgtgctgctttgaaagagctgctgcagaatggtatgaatggtcgtactatccttggtagcactattttagaagatgagtttacaccatttgatgttgttagacaatgctctggtgttaccttccaaggtaagttcaagaaaattgttaagggcactcatcattggatgcttttaactttcttgacatcactattgattcttgttcaaagtacacagtggtcactgtttttctttgtttacgagaatgctttcttgccatttactcttggtattatggcaattgctgcatgtgctatgctgcttgttaagcataagcacgcattcttgtgcttgtttctgttaccttctcttgcaacagttgcttactttaatatggtctacatgcctgctagctgggtgatgcgtatcatgacatggcttgaattggctgacactagcttgtctggttataggcttaaggattgtgttatgtatgcttcagctttagttttgcttattctcatgacagctcgcactgtttatgatgatgctgctagacgtgtttggacactgatgaatgtcattacacttgtttacaaagtctactatggtaatgctttagatcaagctatttccatgtgggccttagttatttctgtaacctctaactattctggtgtcgttacgactatcatgtttttagctagagctatagtgtttgtgtgtgttgagtattacccattgttatttattactggcaacaccttacagtgtatcatgcttgtttattgtttcttaggctattgttgctgctgctactttggccttttctgtttactcaaccgttacttcaggcttactcttggtgtttatgactacttggtctctacacaagaatttaggtatatgaactcccaggggcttttgcctcctaagagtagtattgatgctttcaagcttaacattaagttgttgggtattggaggtaaaccatgtatcaaggttgctactgtacagtctaaaatgtctgacgtaaagtgcacatctgtggtactgctctcggttcttcaacaacttagagtagagtcatcttctaaattgtgggcacaatgtgtacaactccacaatgatattcttcttgcaaaagacacaactgaagctttcgagaagatggtttctcttttgtctgttttgctatccatgcagggtgctgtagacattaataggttgtgcgaggaaatgctcgataaccgtgctactcttcaggctattgcttcagaatttagttctttaccatcatatgccgcttatgccactgcccaggaggcctatgagcaggctgtagctaatggtgattctgaagtcgttctcaaaaagttaaagaaatctttgaatgtggctaaatctgagtttgaccgtgatgctgccatgcaacgcaagttggaaaagatggcagatcaggctatgacccaaatgtacaaacaggcaagatctgaggacaagagggcaaaagtaactagtgctatgcaaacaatgctcttcactatgcttaggaagcttgataatgatgcacttaacaacattatcaacaatgcgcgtgatggttgtgttccactcaacatcataccattgactacagcagccaaactcatggttgttgtccctgattatggtacctacaagaacacttgtgatggtaacacctttacatatgcatctgcactctgggaaatccagcaagttgttgatgcggatagcaagattgttcaacttagtgaaattaacatggacaattcaccaaatttggcttggcctcttattgttacagctctaagagccaactcagctgttaaactacagaataatgaactgagtccagtagcactacgacagatgtcctgtgcggctggtaccacacaaacagcttgtactgatgacaatgcacttgcctactataacaattcgaagggaggtaggtttgtgctggcattactatcagaccaccaagatctcaaatgggctagattccctaagagtgatggtacaggtacaatttacacagaactggaaccaccttgtaggtttgttacagacacaccaaaagggcctaaagtgaaatacttgtacttcatcaaaggcttaaacaacctaaatagaggtatggtgctgggcagtttagctgctacagtacgtcttcaggctggaaatgctacagaagtacctgccaattcaactgtgctttccttctgtgcttttgcagtagaccctgctaaagcatataaggattacctagcaagtggaggacaaccaatcaccaactgtgtgaagatgttgtgtacacacactggtacaggacaggcaattactgtaacaccagaagctaacatggaccaagagtcctttggtggtgcttcatgttgtctgtattgtagatgccacattgaccatccaaatcctaaaggattctgtgacttgaaaggtaagtacgtccaaatacctaccacttgtgctaatgacccagtgggttttacacttagaaacacagtctgtaccgtctgcggaatgtggaaaggttatggctgtagttgtgaccaactccgcgaacccttgatgcagtctgcggatgcatcaacgtttttaaacgggtttgcggtgtaagtgcagcccgtcttacaccgtgcggcacaggcactagtactgatgtcgtctacagggcttttgatatttacaacgaaaaagttgctggttttgcaaagttcctaaaaactaattgctgtcgcttccaggagaaggatgaggaaggcaatttattagactcttactttgtagttaagaggcatactatgtctaactaccaacatgaagagactatttataacttggttaaagattgtccagcggttgctgtccatgactttttcaagtttagagtagatggtgacatggtaccacatatatcacgtcagcgtctaactaaatacacaatggctgatttagtctatgctctacgtcattttgatgagggtaattgtgatacattaaaagaaatactcgtcacatacaattgctgtgatgatgattatttcaataagaaggattggtatgacttcgtagagaatcctgacatcttacgcgtatatgctaacttaggtgagcgtgtacgccaatcattattaaagactgtacaattctgcgatgctatgcgtgatgcaggcattgtaggcgtactgacattagataatcaggatcttaatgggaactggtacgatttcggtgatttcgtacaagtagcaccaggctgcggagttcctattgtggattcatattactcattgctgatgcccatcctcactttgactagggcattggctgctgagtcccatatggatgctgatctcgcaaaaccacttattaagtgggatttgctgaaatatgattttacggaagagagactttgtctcttcgaccgttattttaaatattgggaccagacataccatcccaattgtattaactgtttggatgataggtgtatccttcattgtgcaaactttaatgtgttattttctactgtgtttccacctacaagttttggaccactagtaagaaaaatatttgtagatggtgttccttttgttgtttcaactggataccattttcgtgagttaggagtcgtacataatcaggatgtaaacttacatagctcgcgtctcagtttcaaggaacttttagtgtatgctgctgatccagctatgcatgcagcttctggcaatttattgctagataaacgcactacatgcttttcagtagctgcactaacaaacaatgttgcttttcaaactgtcaaacccggtaattttaataaagacttttatgactttgctgtgtctaaaggtttctttaaggaaggaagttctgttgaactaaaacacttcttctttgctcaggatggcaacgctgctatcagtgattatgactattatcgttataatctgccaacaatgtgtgatatcagacaactcctattcgtagttgaagttgttgataaatactttgattgttacgatggtggctgtattaatgccaaccaagtaatcgttaacaatctggataaatcagctggtttcccatttaataaatggggtaaggctagactttattatgactcaatgagttatgaggatcaagatgcacttttcgcgtatactaagcgtaatgtcatccctactataactcaaatgaatcttaagtatgccattagtgcaaagaatagagctcgcaccgtagctggtgtctctatctgtagtactatgacaaatagacagtttcatcagaaattattgaagtcaatagccgccactagaggagctactgtggtaattggaacaagcaagttttacggtggctggcataatatgttaaaaactgtttacagtgatgtagaaactccacaccttatgggttgggattatccaaaatgtgacagagccatgcctaacatgcttaggataatggcctctcttgttcttgctcgcaaacataacacttgctgtaacttatcacaccgtttctacaggttagctaacgagtgtgcgcaagtattaagtgagatggtcatgtgtggcggctcactatatgttaaaccaggtggaacatcatccggtgatgctacaactgcttatgctaatagtgtctttaacatttgtcaagctgttacagccaatgtaaatgcacttctttcaactgatggtaataagatagctgacaagtatgtccgcaatctacaacacaggctctatgagtgtctctatagaaatagggatgttgatcatgaattcgtggatgagttttacgcttacctgcgtaaacatttctccatgatgattctttctgatgatgccgttgtgtgctataacagtaactatgcggctcaaggtttagtagctagcattaagaactttaaggcagttctttattatcaaaataatgtgttcatgtctgaggcaaaatgttggactgagactgaccttactaaaggacctcacgaattttgctcacagcatacaatgctagttaaacaaggagatgattacgtgtacctgccttacccagatccatcaagaatattaggcgcaggctgttttgtcgatgatattgtcaaaacagatggtacacttatgattgaaaggttcgtgtcactggctattgatgcttacccacttacaaaacatcctaatcaggagtatgctgatgtctttcacttgtatttacaatacattagaaagttacatgatgagcttactggccacatgttggacatgtattccgtaatgctaactaatgataacacctcacggtactgggaacctgagttttatgaggctatgtacacaccacatacagtcttgcaggctgtaggtgcttgtgtattgtgcaattcacagacttcacttcgttgcggtgcctgtattaggagaccattcctatgttgcaagtgctgctatgaccatgtcatttcaacatcacacaaattagtgttgtctgttaatccctatgtttgcaatgccccaggttgtgatgtcactgatgtgacacaactgtatctaggaggtatgagctattattgcaagtcacataagcctcccattagttttccattatgtgctaatggtcaggtttttggtttatacaaaaacacatgtgtaggcagtgacaatgtcactgacttcaatgcgatagcaacatgtgattggactaatgctggcgattacatacttgccaacacttgtactgagagactcaagcttttcgcagcagaaacgctcaaagccactgaggaaacatttaagctgtcatatggtattgccactgtacgcgaagtactctctgacagagaattgcatctttcatgggaggttggaaaacctagaccaccattgaacagaaactatgtctttactggttaccgtgtaactaaaaatagtaaagtacagattggagagtacacctttgaaaaaggtgactatggtgatgctgttgtgtacagaggtactacgacatacaagttgaatgttggtgattactttgtgttgacatctcacactgtaatgccacttagtgcacctactctagtgccacaagagcactatgtgagaattactggcttgtacccaacactcaacatctcagatgagttttctagcaatgttgcaaattatcaaaaggtcggcatgcaaaagtactctacactccaaggaccacctggtactggtaagagtcattttgccatcggacttgctctctattacccatctgctcgcatagtgtatacggcatgctctcatgcagctgttgatgccctatgtgaaaaggcattaaaatatttgcccatagataaatgtagtagaatcatacctgcgcgtgcgcgcgtagagtgttttgataaattcaaagtgaattcaacactagaacagtatgttttctgcactgtaaatgcattgccagaaacaactgctgacattgtagtctttgatgaaatctctatggctactaattatgacttgagtgttgtcaatgctagacttcgtgcaaaacactacgtctatattggcgatcctgctcaattaccagccccccgcacattgctgactaaaggcacactagaaccagaatattttaattcagtgtgcagacttatgaaaacaataggtccagacatgttccttggaacttgtcgccgttgtcctgctgaaattgttgacactgtgagtgctttagtttatgacaataagctaaaagcacacaaggataagtcagctcaatgcttcaaaatgttctacaaaggtgttattacacatgatgtttcatctgcaatcaacagacctcaaataggcgttgtaagagaatttcttacacgcaatcctgcttggagaaaagctgtttttatctcaccttataattcacagaacgctgtagcttcaaaaatcttaggattgcctacgcagactgttgattcatcacagggttctgaatatgactatgtcatattcacacaaactactgaaacagcacactcttgtaatgtcaaccgcttcaatgtggctatcacaagggcaaaaattggcattttgtgcataatgtctgatagagatctttatgacaaactgcaatttacaagtctagaaataccacgtcgcaatgtggctacattacaagcagaaaatgtaactggactttttaaggactgtagtaagatcattactggtcttcatcctacacaggcacctacacacctcagcgttgatataaagttcaagactgaaggattatgtgttgacataccaggcataccaaaggacatgacctaccgtagactcatctctatgatgggtttcaaaatgaattaccaagtcaatggttaccctaatatgtttatcacccgcgaagaagctattcgtcacgttcgtgcgtggattggctttgatgtagagggctgtcatgcaactagagatgctgtgggtactaacctacctctccagctaggattttctacaggtgttaacttagtagctgtaccgactggttatgttgacactgaaaataacacagaattcaccagagttaatgcaaaacctccaccaggtgaccagtttaaacatcttataccactcatgtataaaggcttgccctggaatgtagtgcgtattaagatagtacaaatgctcagtgatacactgaaaggattgtcagacagagtcgtgttcgtcctttgggcgcatggctttgagcttacatcaatgaagtactttgtcaagattggacctgaaagaacgtgttgtctgtgtgacaaacgtgcaacttgcttttctacttcatcagatacttatgcctgctggaatcattctgtgggttttgactatgtctataacccatttatgattgatgttcagcagtggggctttacgggtaaccttcagagtaaccatgaccaacattgccaggtacatggaaatgcacatgtggctagttgtgatgctatcatgactagatgtttagcagtccatgagtgctttgttaagcgcgttgattggtctgttgaataccctattataggagatgaactgagggttaattctgcttgcagaaaagtacaacacatggttgtgaagtctgcattgcttgctgataagtttccagttcttcatgacataggaaatccaaaggctatcaagtgtgtgcctcaggctgaagtagaatggaagttctacgatgctcagccatgtagtgacaaagcttacaaaatagaggaactcttctattcttatgctatacatcacgataaattcactgatggtgtttgtttgttttggaattgtaacgttgatcgttacccagccaatgcaattgtgtgtaggtttgacacaagagtcttgtcaaacttgaacttaccaggctgtgatggtggtagtttgtatgtgaataagcatgcattccacactccagctttcgataaaagtgcatttactaatttaaagcaattgcctttcttttactattctgatagtccttgtgagtctcatggcaaacaagtagtgtcggatattgattatgttccactcaaatctgctacgtgtattacacgatgcaatttaggtggtgctgtttgcagacaccatgcaaatgagtaccgacagtacttggatgcatataatatgatgatttctgctggatttagcctatggatttacaaacaatttgatacttataacctgtggaatacatttaccaggttacagagtttagaaaatgtggcttataatgttgttaataaaggacactttgatggacacgccggcgaagcacctgtttccatcattaataatgctgtttacacaaaggtagatggtattgatgtggagatctttgaaaataagacaacacttcctgttaatgttgcatttgagctttgggctaagcgtaacattaaaccagtgccagagattaagatactcaataatttgggtgttgatatcgctgctaatactgtaatctgggactacaaaagagaagccccagcacatgtatctacaataggtgtctgcacaatgactgacattgccaagaaacctactgagagtgcttgttcttcacttactgtcttgtttgatggtagagtggaaggacaggtagacctttttagaaacgcccgtaatggtgttttaataacagaaggttcagtcaaaggtctaacaccttcaaagggaccagcacaagctagcgtcaatggagtcacattaattggagaatcagtaaaaacacagtttaactactttaagaaagtagacggcattattcaacagttgcctgaaacctactttactcagagcagagacttagaggattttaagcccagatcacaaatggaaactgactttctcgagctcgctatggatgaattcatacagcgatataagctcgagggctatgccttcgaacacatcgtttatggagatttcagtcatggacaacttggcggtcttcatttaatgataggcttagccaagcgctcacaagattcaccacttaaattagaggattttatccctatggacagcacagtgaaaaattacttcataacagatgcgcaaacaggttcatcaaaatgtgtgtgttctgtgattgatcttttacttgatgactttgtcgagataataaagtcacaagatttgtcagtgatttcaaaagtggtcaaggttacaattgactatgctgaaatttcattcatgctttggtgtaaggatggacatgttgaaaccttctacccaaaactacaagcaagtcaagcgtggcaaccaggtgttgcgatgcctaacttgtacaagatgcaaagaatgcttcttgaaaagtgtgaccttcagaattatggtgaaaatgctgttataccaaaaggaataatgatgaatgtcgcaaagtatactcaactgtgtcaatacttaaatacacttactttagctgtaccctacaacatgagagttattcactttggtgctggctctgataaaggagttgcaccaggtacagctgtgctcagacaatggttgccaactggcacactacttgtcgattcagatcttaatgacttcgtctccgacgcagattctactttaattggagactgtgcaacagtacatacggctaataaatgggaccttattattagcgatatgtatgaccctaggaccaaacatgtgacaaaagagaatgactctaaagaagggtttttcacttatctgtgtggatttataaagcaaaaactagccctgggtggttctatagctgtaaagataacagagcattcttggaatgctgacctttacaagcttatgggccatttctcatggtggacagcttttgttacaaatgtaaatgcatcatcatcggaagcatttttaattggggctaactatcttggcaagccgaaggaacaaattgatggctataccatgcatgctaactacattttctggaggaacacaaatcctatccagttgtcttcctattcactctttgacatgagcaaatttcctcttaaattaagaggaactgctgtaatgtctcttaaggagaatcaaatcaatgatatgatttattctcttctggaaaaaggtaggcttatcattagagaaaacaacagagttgtggtttcaagtgatattcttgttaacaactaaacgaacatgtttattttcttattatttcttactctcactagtggtagtgaccttgaccggtgcaccacttttgatgatgttcaagctcctaattacactcaacatacttcatctatgaggggggtttactatcctgatgaaatttttagatcagacactctttatttaactcaggatttatttcttccattttattctaatgttacagggtttcatactattaatcatacgtttggcaaccctgtcataccttttaaggatggtatttattttgctgccacagagaaatcaaatgttgtccgtggttgggtttttggttctaccatgaacaacaagtcacagtcggtgattattattaacaattctactaatgttgttatacgagcatgtaactttgaattgtgtgacaaccctttctttgctgtttctaaacccatgggtacacagacacatactatgatattcgataatgcatttaattgcactttcgagtacatatctgatgccttttcgcttgatgtttcagaaaagtcaggtaattttaaacacttacgagagtttgtgtttaaaaataaagatgggtttctctatgtttataagggctatcaacctatagatgtagttcgtgatctaccttctggttttaacactttgaaacctatttttaagttgcctcttggtattaacattacaaattttagagccattcttacagccttttcacctgctcaagacatttggggcacgtcagctgcagcctattttgttggctatttaaagccaactacatttatgctcaagtatgatgaaaatggtacaatcacagatgctgttgattgttctcaaaatccacttgctgaactcaaatgctctgttaagagctttgagattgacaaaggaatttaccagacctctaatttcagggttgttccctcaggagatgttgtgagattccctaatattacaaacttgtgtccttttggagaggtttttaatgctactaaattcccttctgtctatgcatgggagagaaaaaaaatttctaattgtgttgctgattactctgtgctctacaactcaacatttttttcaacctttaagtgctatggcgtttctgccactaagttgaatgatctttgcttctccaatgtctatgcagattcttttgtagtcaagggagatgatgtaagacaaatagcgccaggacaaactggtgttattgctgattataattataaattgccagatgatttcatgggttgtgtccttgcttggaatactaggaacattgatgctacttcaactggtaattataattataaatataggtatcttagacatggcaagcttaggccctttgagagagacatatctaatgtgcctttctcccctgatggcaaaccttgcaccccacctgctcttaattgttattggccattaaatgattatggtttttacaccactactggcattggctaccaaccttacagagttgtagtactttcttttgaacttttaaatgcaccggccacggtttgtggaccaaaattatccactgaccttattaagaaccagtgtgtcaattttaattttaatggactcactggtactggtgtgttaactccttcttcaaagagatttcaaccatttcaacaatttggccgtgatgtttctgatttcactgattccgttcgagatcctaaaacatctgaaatattagacatttcaccttgctcttttgggggtgtaagtgtaattacacctggaacaaatgcttcatctgaagttgctgttctatatcaagatgttaactgcactgatgtttctacagcaattcatgcagatcaactcacaccagcttggcgcatatattctactggaaacaatgtattccagactcaagcaggctgtcttataggagctgagcatgtcgacacttcttatgagtgcgacattcctattggagctggcatttgtgctagttaccatacagtttctttattacgtagtactagccaaaaatctattgtggcttatactatgtctttaggtgctgatagttcaattgcttactctaataacaccattgctatacctactaacttttcaattagcattactacagaagtaatgcctgtttctatggctaaaacctccgtagattgtaatatgtacatctgcggagattctactgaatgtgctaatttgcttctccaatatggtagcttttgcacacaactaaatcgtgcactctcaggtattgctgctgaacaggatcgcaacacacgtgaagtgttcgctcaagttaaacaaatgtacaaaaccccaactttgaaatattttggtggttttaatttttcacaaatattacctgaccctctaaagccaactaagaggtcttttattgaggacttgctctttaataaggtgacactcgctgatgctggcttcatgaagcaatatggcgaatgcctaggtgatattaatgctagagatctcatttgtgcgcagaagttcaatggacttacagtgttgccacctctgctcactgatgatatgattgctgcctacactgctgctctagttagtggtactgccactgctggatggacatttggtgctggcgctgctcttcaaataccttttgctatgcaaatggcatataggttcaatggcattggagttacccaaaatgttctctatgagaaccaaaaacaaatcgccaaccaatttaacaaggcgattagtcaaattcaagaatcacttacaacaacatcaactgcattgggcaagctgcaagacgttgttaaccagaatgctcaagcattaaacacacttgttaaacaacttagctctaattttggtgcaatttcaagtgtgctaaatgatatcctttcgcgacttgataaagtcgaggcggaggtacaaattgacaggttaattacaggcagacttcaaagccttcaaacctatgtaacacaacaactaatcagggctgctgaaatcagggcttctgctaatcttgctgctactaaaatgtctgagtgtgttcttggacaatcaaaaagagttgacttttgtggaaagggctaccaccttatgtccttcccacaagcagccccgcatggtgttgtcttcctacatgtcacgtatgtgccatcccaggagaggaacttcaccacagcgccagcaatttgtcatgaaggcaaagcatacttccctcgtgaaggtgtttttgtgtttaatggcacttcttggtttattacacagaggaacttcttttctccacaaataattactacagacaatacatttgtctcaggaaattgtgatgtcgttattggcatcattaacaacacagtttatgatcctctgcaacctgagcttgactcattcaaagaagagctggacaagtacttcaaaaatcatacatcaccagatgttgatcttggcgacatttcaggcattaacgcttctgtcgtcaacattcaaaaagaaattgaccgcctcaatgaggtcgctaaaaatttaaatgaatcactcattgaccttcaagaattgggaaaatatgagcaatatattaaatggccttggtatgtttggctcggcttcattgctggactaattgccatcgtcatggttacaatcttgctttgttgcatgactagttgttgcagttgcctcaagggtgcatgctcttgtggttcttgctgcaagtttgatgaggatgactctgagccagttctcaagggtgtcaaattacattacacataaacgaacttatggatttgtttatgagattttttactcttggatcaattactgcacagccagtaaaaattgacaatgcttctcctgcaagtactgttcatgctacagcaacgataccgctacaagcctcactccctttcggatggcttgttattggcgttgcatttcttgctgtttttcagagcgctaccaaaataattgcgctcaataaaagatggcagctagccctttataagggcttccagttcatttgcaatttactgctgctatttgttaccatctattcacatcttttgcttgtcgctgcaggtatggaggcgcaatttttgtacctctatgccttgatatattttctacaatgcatcaacgcatgtagaattattatgagatgttggctttgttggaagtgcaaatccaagaacccattactttatgatgccaactactttgtttgctggcacacacataactatgactactgtataccatataacagtgtcacagatacaattgtcgttactgaaggtgacggcatttcaacaccaaaactcaaagaagactaccaaattggtggttattctgaggataggcactcaggtgttaaagactatgtcgttgtacatggctatttcaccgaagtttactaccagcttgagtctacacaaattactacagacactggtattgaaaatgctacattcttcatctttaacaagcttgttaaagacccaccgaatgtgcaaatacacacaatcgacggctcttcaggagttgctaatccagcaatggatccaatttatgatgagccgacgacgactactagcgtgcctttgtaagcacaagaaagtgagtacgaacttatgtactcattcgtttcggaagaaacaggtacgttaatagttaatagcgtacttctttttcttgctttcgtggtattcttgctagtcacactagccatccttactgcgcttcgattgtgtgcgtactgctgcaatattgttaacgtgagtttagtaaaaccaacggtttacgtctactcgcgtgttaaaaatctgaactcttctgaaggagttcctgatcttctggtctaaacgaactaactattattattattctgtttggaactttaacattgcttatcatggcagacaacggtactattaccgttgaggagcttaaacaactcctggaacaatggaacctagtaataggtttcctattcctagcctggattatgttactacaatttgcctattctaatcggaacaggtttttgtacataataaagcttgttttcctctggctcttgtggccagtaacacttgcttgttttgtgcttgctgctgtctacagaattaattgggtgactggcgggattgcgattgcaatggcttgtattgtaggcttgatgtggcttagctacttcgttgcttccttcaggctgtttgctcgtacccgctcaatgtggtcattcaacccagaaacaaacattcttctcaatgtgcctctccgggggacaattgtgaccagaccgctcatggaaagtgaacttgtcattggtgctgtgatcattcgtggtcacttgcgaatggccggacactccctagggcgctgtgacattaaggacctgccaaaagagatcactgtggctacatcacgaacgctttcttattacaaattaggagcgtcgcagcgtgtaggcactgattcaggttttgctgcatacaaccgctaccgtattggaaactataaattaaatacagaccacgccggtagcaacgacaatattgctttgctagtacagtaagtgacaacagatgtttcatcttgttgacttccaggttacaatagcagagatattgattatcattatgaggactttcaggattgctatttggaatcttgacgttataataagttcaatagtgagacaattatttaagcctctaactaagaagaattattcggagttagatgatgaagaacctatggagttagattatccataaaacgaacatgaaaattattctcttcctgacattgattgtatttacatcttgcgagctatatcactatcaggagtgtgttagaggtacgactgtactactaaaagaaccttgcccatcaggaacatacgagggcaattcaccatttcaccctcttgctgacaataaatttgcactaacttgcactagcacacactttgcttttgcttgtgctgacggtactcgacatacctatcagctgcgtgcaagatcagtttcaccaaaacttttcatcagacaagaggaggttcaacaagagctctactcgccactttttctcattgttgctgctctagtatttttaatactttgcttcaccattaagagaaagacagaatgaatgagctcactttaattgacttctatttgtgctttttagcctttctgctattccttgttttaataatgcttattatattttggttttcactcgaaatccaggatctagaagaaccttgtaccaaagtctaaacgaacatgaaacttctcattgttttgacttgtatttctctatgcagttgcatatgcactgtagtacagcgctgtgcatctaataaacctcatgtgcttgaagatccttgtaaggtacaacactaggggtaatacttatagcactgcttggctttgtgctctaggaaaggttttaccttttcatagatggcacactatggttcaaacatgcacacctaatgttactatcaactgtcaagatccagctggtggtgcgcttatagctaggtgttggtaccttcatgaaggtcaccaaactgctgcatttagagacgtacttgttgttttaaataaacgaacaaattaaaatgtctgataatggaccccaatcaaaccaacgtagtgccccccgcattacatttggtggacccacagattcaactgacaataaccagaatggaggacgcaatggggcaaggccaaaacagcgccgaccccaaggtttacccaataatactgcgtcttggttcacagctctcactcagcatggcaaggaggaacttagattccctcgaggccagggcgttccaatcaacaccaatagtggtccagatgaccaaattggctactaccgaagagctacccgacgagttcgtggtggtgacggcaaaatgaaagagctcagccccagatggtacttctattacctaggaactggcccagaagcttcacttccctacggcgctaacaaagaaggcatcgtatgggttgcaactgagggagccttgaatacacccaaagaccacattggcacccgcaatcctaataacaatgctgccaccgtgctacaacttcctcaaggaacaacattgccaaaaggcttctacgcagagggaagcagaggcggcagtcaagcctcttctcgctcctcatcacgtagtcgcggtaattcaagaaattcaactcctggcagcagtaggggaaattctcctgctcgaatggctagcggaggtggtgaaactgccctcgcgctattgctgctagacagattgaaccagcttgagagcaaagtttctggtaaaggccaacaacaacaaggccaaactgtcactaagaaatctgctgctgaggcatctaaaaagcctcgccaaaaacgtactgccacaaaacagtacaacgtcactcaagcatttgggagacgtggtccagaacaaacccaaggaaatttcggggaccaagacctaatcagacaaggaactgattacaaacattggccgcaaattgcacaatttgctccaagtgcctctgcattctttggaatgtcacgcattggcatggaagtcacaccttcgggaacatggctgacttatcatggagccattaaattggatgacaaagatccacaattcaaagacaacgtcatactgctgaacaagcacattgacgcatacaaaacattcccaccaacagagcctaaaaaggacaaaaagaaaaagactgatgaagctcagcctttgccgcagagacaaaagaagcagcccactgtgactcttcttcctgcggctgacatggatgatttctccagacaacttcaaaattccatgagtggagcttctgctgattcaactcaggcataaacactcatgatgaccacacaaggcagatgggctatgtaaacgttttcgcaattccgtttacgatacatagtctactcttgtgcagaatgaattctcgtaactaaacagcacaagtaggtttagttaactttaatctcacatagcaatctttaatcaatgtgtaacattagggaggacttgaaagagccaccacattttcatcgaggccacgcggagtacgatcgagggtacagtgaataatgctagggagagctgcctatatggaagagccctaatgtgtaaaattaattttagtagtgctatccccatgtgattttaatagcttcttaggagaatgac

SEQ ID NO: 29756 - DNA, 29706 bp, SARS Coronavirus
  misc_feature 20688: n = A,T,C or G
tacccaggaaaagccaaccaacctcgatctcttgtagatctgttctctaaacgaactttaaaatctgtgtagctgtcgctcggctgcatgcctagtgcacctacgcagtataaacaataataaattttactgtcgttgacaagaaacgagtaactcgtccctcttctgcagactgcttacggtttcgtccgtgttgcagtcgatcatcagcatacctaggtttcgtccgggtgtgaccgaaaggtaagatggagagccttgttcttggtgtcaacgagaaaacacacgtccaactcagtttgcctgtccttcaggttagagacgtgctagtgcgtggcttcggggactctgtggaagaggccctatcggaggcacgtgaacacctcaaaaatggcacttgtggtctagtagagctggaaaaaggcgtactgccccagcttgaacagccctatgtgttcattaaacgttctgatgccttaagcaccaatcacggccacaaggtcgttgagctggttgcagaaatggacggcattcagtacggtcgtagcggtataacactgggagtactcgtgccacatgtgggcgaaaccccaattgcataccgcaatgttcttcttcgtaagaacggtaataagggagccggtggtcatagctatggcatcgatctaaagtcttatgacttaggtgacgagcttggcactgatcccattgaagattatgaacaaaactggaacactaagcatggcagtggtgcactccgtgaactcactcgtgagctcaatggaggtgcagtcactcgctatgtcgacaacaatttctgtggcccagatgggtaccctcttgattgcatcaaagattttctcgcacgcgcgggcaagtcaatgtgcactctttccgaacaacttgattacatcgagtcgaagagaggtgtctactgctgccgtgaccatgagcatgaaattgcctggttcactgagcgctctgataagagctacgagcaccagacacccttcgaaattaagagtgccaagaaatttgacactttcaaaggggaatgcccaaagtttgtgtttcctcttaactcaaaagtcaaagtcattcaaccacgtgttgaaaagaaaaagactgagggtttcatggggcgtatacgctctgtgtaccctgttgcatctccacaggagtgtaacaatatgcacttgtctaccttgatgaaatgtaatcattgcgatgaagtttcatggcagacgtgcgactttctgaaagccacttgtgaacattgtggcactgaaaatttagttattgaaggacctactacatgtgggtacctacctactaatgctgtagtgaaaatgccatgtcctgcctgtcaagacccagagattggacctgagcatagtgttgcagattatcacaaccactcaaacattgaaactcgactccgcaagggaggtaggactagatgttttggaggctgtgtgtttgcctatgttggctgctataataagcgtgcctactgggttcctcgtgctagtgctgatattggctcaggccatactggcattactggtgacaatgtggagaccttgaatgaggatctccttgagatactgagtcgtgaacgtgttaacattaacattgttggcgattttcatttgaatgaagaggttgccatcattttggcatctttctctgcttctacaagtgcctttattgacactataaagagtcttgattacaagtctttcaaaaccattgttgagtcctgcggtaactataaagttaccaagggaaagcccgtaaaaggtgcttggaacattggacaacagagatcagttttaacaccactgtgtggttttccctcacaggctgctggtgttatcagatcaatttttgcgcgcacacttgatgcagcaaaccactcaattcctgatttgcaaagagcagctgtcaccatacttgatggtatttctgaacagtcattacgtcttgtcgacgccatggtttatacttcagacctgctcaccaacagtgtcattattatggcatatgtaactggtggtcttgtacaacagacttctcagtggttgtctaatcttttgggcactactgttgaaaaactcaggcctatctttgaatggattgaggcgaaacttagtgcaggagttgaatttctcaaggatgcttgggagattctcaaatttctcattacaggtgtttttgacatcgtcaagggtcaaatacaggttgcttcagataacatcaaggattgtgtaaaatgcttcattgatgttgttaacaaggcactcgaaatgtgcattgatcaagtcactatcgctggcgcaaagttgcgatcactcaacttaggtgaagtcttcatcgctcaaagcaagggactttaccgtcagtgtatacgtggcaaggagcagctgcaactactcatgcctcttaaggcaccaaaagaagtaacctttcttgaaggtgattcacatgacacagtacttacctctgaggaggttgttctcaagaacggtgaactcgaagcactcgagacgcccgttgatagcttcacaaatggagctatcgttggcacaccagtctgtgtaaatggcctcatgctcttagagattaaggacaaagaacaatactgcgcattgtctcctggtttactggctacaaacaatgtctttcgcttaaaagggggtgcaccaattaaaggtgtaacctttggagaagatactgtttgggaagttcaaggttacaagaatgtgagaatcacatttgagcttgatgaacgtgttgacaaagtgcttaatgaaaagtgctctgtctacactgttgaatccggtaccgaagttactgagtttgcatgtgttgtagcagaggctgttgtgaagactttacaaccagtttctgatctccttaccaacatgggtattgatcttgatgagtggagtgtagctacattctacttatttgatgatgctggtgaagaaaacttttcatcacgtatgtattgttccttttaccctccagatgaggaagaagaggacgatgcagagtgtgaggaagaagaaattgatgaaacctgtgaacatgagtacggtacagaggatgattatcaaggtctccctctggaatttggtgcctcagctgaaacagttcgagttgaggaagaagaagaggaagactggctggatgatactactgagcaatcagagattgagccagaaccagaacctacacctgaagaaccagttaatcagtttactggttatttaaaacttactgacaatgttgccattaaatgtgttgacatcgttaaggaggcacaaagtgctaatcctatggtgattgtaaatgctgctaacatacacctgaaacatggtggtggtgtagcaggtgcactcaacaaggcaaccaatggtgccatgcaaaaggagagtgatgattacattaagctaaatggccctcttacagtaggagggtcttgtttgctttctggacataatcttgctaagaagtgtctgcatgttgttggacctaacctaaatgcaggtgaggacatccagcttcttaaggcagcatatgaaaatttcaattcacaggacatcttacttgcaccattgttgtcagcaggcatatttggtgctaaaccacttcagtctttacaagtgtgcgtgcagacggttcgtacacaggtttatattgcagtcaatgacaaagctctttatgagcaggttgtcatggattatcttgataacctgaagcctagagtggaagcacctaaacaagaggagccaccaaacacagaagattccaaaactgaggagaaatctgtcgtacagaagcctgtcgatgtgaagccaaaaattaaggcctgcattgatgaggttaccacaacactggaagaaactaagtttcttaccaataagttactcttgtttgctgatatcaatggtaagctttaccatgattctcagaacatgcttagaggtgaagatatgtctttccttgagaaggatgcaccttacatggtaggtgatgttatcactagtggtgatatcacttgtgttgtaataccctccaaaaaggctggtggcactactgagatgctctcaagagctttgaagaaagtgccagttgatgagtatataaccacgtaccctggacaaggatgtgctggttatacacttgaggaagctaagactgctcttaagaaatgcaaatctgcattttatgtactaccttcagaagcacctaatgctaaggaagagattctaggaactgtatcctggaatttgagagaaatgcttgctcatgctgaagagacaagaaaattaatgcctatatgcatggatgttagagccataatggcaaccatccaacgtaagtataaaggaattaaaattcaagagggcatcgttgactatggtgtccgattcttcttttatactagtaaagagcctgtagcttctattattacgaagctgaactctctaaatgagccgcttgtcacaatgccaattggttatgtgacacatggttttaatcttgaagaggctgcgcgctgtatgcgttctcttaaagctcctgccgtagtgtcagtatcatcaccagatgctgttactacatataatggatacctcacttcgtcatcaaagacatctgaggagcactttgtagaaacagtttctttggctggctcttacagagattggtcctattcaggacagcgtacagagttaggtgttgaatttcttaagcgtggtgacaaaattgtgtaccacactctggagagccccgtcgagtttcatcttgacggtgaggttctttcacttgacaaactaaagagtctcttatccctgcgggaggttaagactataaaagtgttcacaactgtggacaacactaatctccacacacagcttgtggatatgtctatgacatatggacagcagtttggtccaacatacttggatggtgctgatgttacaaaaattaaacctcatgtaaatcatgagggtaagactttctttgtactacctagtgatgacacactacgtagtgaagctttcgagtactaccatactcttgatgagagttttcttggtaggtacatgtctgctttaaaccacacaaagaaatggaaatttcctcaagttggtggtttaacttcaattaaatgggctgataacaattgttatttgtctagtgttttattagcacttcaacagcttgaagtcaaattcaatgcaccagcacttcaagaggcttattatagagcccgtgctggtgatgctgctaacttttgtgcactcatactcgcttacagtaataaaactgttggcgagcttggtgatgtcagagaaactatgacccatcttctacagcatgctaatttggaatctgcaaagcgagttcttaatgtggtgtgtaaacattgtggtcagaaaactactaccttaacgggtgtagaagctgtgatgtatatgggtactctatcttatgataatcttaagacaggtgtttccattccatgtgtgtgtggtcgtgatgctacacaatatctagtacaacaagagtcttcttttgttatgatgtctgcaccacctgctgagtataaattacagcaaggtacattcttatgtgcgaatgagtacactggtaactatcagtgtggtcattacactcatataactgctaaggagaccctctatcgtattgacggagctcaccttacaaagatgtcagagtacaaaggaccagtgactgatgttttctacaaggaaacatcttacactacaaccatcaagcctgtgtcgtataaactcgatggagttacttacacagagattgaaccaaaattggatgggtattataaaaaggataatgcttactatacagagcagcctatagaccttgtaccaactcaaccattaccaaatgcgagttttgataatttcaaactcacatgttctaacacaaaatttgctgatgatttaaatcaaatgacaggcttcacaaagccagcttcacgagagctatctgtcacattcttcccagacttgaatggcgatgtagtggctattgactatagacactattcagcgagtttcaagaaaggtgctaaattactgcataagccaattgtttggcacattaaccaggctacaaccaagacaacgttcaaaccaaacacttggtgtttacgttgtctttggagtacaaagccagtagatacttcaaattcatttgaagttctggcagtagaagacacacaaggaatggacaatcttgcttgtgaaagtcaacaacccacctctgaagaagtagtggaaaatcctaccatacagaaggaagtcatagagtgtgacgtgaaaactaccgaagttgtaggcaatgtcatacttaaaccatcagatgaaggtgttaaagtaacacaagagttaggtcatgaggatcttatggctgcttatgtggaaaacacaagcattaccattaagaaacctaatgagctttcactagccttaggtttaaaaacaattgccactcatggtattgctgcaattaatagtgttccttggagtaaaattttggcttatgtcaaaccattcttaggacaagcagcaattacaacatcaaattgcgctaagagattagcacaacgtgtgtttaacaattatatgccttatgtgtttacattattgttccaattgtgtacttttactaaaagtaccaattctagaattagagcttcactacctacaactattgctaaaaatagtgttaagagtgttgctaaattatgtttggatgccggcattaattatgtgaagtcacccaaattttctaaattgttcacaatcgctatgtggctattgttgttaagtatttgcttaggttctctaatctgtgtaactgctgcttttggtgtactcttatctaattttggtgctccttcttattgtaatggcgttagagaattgtatcttaattcgtctaacgttactactatggatttctgtgaaggttcttttccttgcagcatttgtttaagtggattagactcccttgattcttatccagctcttgaaaccattcaggtgacgatttcatcgtacaagctagacttgacaattttaggtctggccgctgagtgggttttggcatatatgttgttcacaaaattcttttatttattaggtctttcagctataatgcaggtgttctttggctattttgctagtcatttcatcagcaattcttggctcatgtggtttatcattagtattgtacaaatggcacccgtttctgcaatggttaggatgtacatcttctttgcttctttctactacatatggaagagctatgttcatatcatggatggttgcacctcttcgacttgcatgatgtgctataagcgcaatcgtgccacacgcgttgagtgtacaactattgttaatggcatgaagagatctttctatgtctatgcaaatggaggccgtggcttctgcaagactcacaattggaattgtctcaattgtgacacattttgcactggtagtacattcattagtgatgaagttgctcgtgatttgtcactccagtttaaaagaccaatcaaccctactgaccagtcatcgtatattgttgatagtgttgctgtgaaaaatggcgcgcttcacctctactttgacaaggctggtcaaaagacctatgagagacatccgctctcccattttgtcaatttagacaatttgagagctaacaacactaaaggttcactgcctattaatgtcatagtttttgatggcaagtccaaatgcgacgagtctgcttctaagtctgcttctgtgtactacagtcagctgatgtgccaacctattctgttgcttgaccaagctcttgtatcagacgttggagatagtactgaagtttccgttaagatgtttgatgcttatgtcgacaccttttcagcaacttttagtgttcctatggaaaaacttaaggcacttgttgctacagctcacagcgagttagcaaagggtgtagctttagatggtgtcctttctacattcgtgtcagctgcccgacaaggtgttgttgataccgatgttgacacaaaggatgttattgaatgtctcaaactttcacatcactctgacttagaagtgacaggtgacagttgtaacaatttcatgctcacctataataaggttgaaaacatgacgcccagagatcttggcgcatgtattgactgtaatgcaaggcatatcaatgcccaagtagcaaaaagtcacaatgtttcactcatctggaatgtaaaagactacatgtctttatctgaacagctgcgtaaacaaattcgtagtgctgccaagaagaacaacataccttttagactaacttgtgctacaactagacaggttgtcaatgtcataactactaaaatctcactcaagggtggtaagattgttagtacttgttttaaacttatgcttaaggccacattattgtgcgttcttgctgcattggtttgttatatcgttatgccagtacatacattgtcaatccatgatggttacacaaatgaaatcattggttacaaagccattcaggatggtgtcactcgtgacatcatttctactgatgattgttttgcaaataaacatgctggttttgacgcatggtttagccagcgtggtggttcatacaaaaatgacaaaagctgccctgtagtagctgctatcattacaagagagattggtttcatagtgcctggcttaccgggtactgtgctgagagcaatcaatggtgacttcttgcattttctacctcgtgtttttagtgctgttggcaacatttgctacacaccttccaaactcattgagtatagtgattttgctacctctgcttgcgttcttgctgctgagtgtacaatttttaaggatgctatgggcaaacctgtgccatattgttatgacactaatttgctagagggttctatttcttatagtgagcttcgtccagacactcgttatgtgcttatggatggttccatcatacagtttcctaacacttacctggagggttctgttagagtagtaacaacttttgatgctgagtactgtagacatggtacatgcgaaaggtcagaagtaggtatttgcctatctaccagtggtagatgggttcttaataatgagcattacagagctctatcaggagttttctgtggtgttgatgcgatgaatctcatagctaacatctttactcctcttgtgcaacctgtgggtgctttagatgtgtctgcttcagtagtggctggtggtattattgccatattggtgacttgtgctgcctactactttatgaaattcagacgtgtttttggtgagtacaaccatgttgttgctgctaatgcacttttgtttttgatgtctttcactatactctgtctggtaccagcttacagctttctgccgggagtctactcagtcttttacttgtacttgacattctatttcaccaatgatgtttcattcttggctcaccttcaatggtttgccatgttttctcctattgtgcctttttggataacagcaatctatgtattctgtatttctctgaagcactgccattggttctttaacaactatcttaggaaaagagtcatgtttaatggagttacatttagtaccttcgaggaggctgctttgtgtacctttttgctcaacaaggaaatgtacctaaaattgcgtagcgagacactgttgccacttacacagtataacaggtatcttgctctatataacaagtacaagtatttcagtggagccttagatactaccagctatcgtgaagcagcttgctgccacttagcaaaggctctaaatgactttagcaactcaggtgctgatgttctctaccaaccaccacagacatcaatcacttctgctgttctgcagagtggttttaggaaaatggcattcccgtcaggcaaagttgaagggtgcatggtacaagtaacctgtggaactacaactcttaatggattgtggttggatgacacagtatactgtccaagacatgtcatttgcacagcagaagacatgcttaatcctaactatgaagatctgctcattcgcaaatccaaccatagctttcttgttcaggctggcaatgttcaacttcgtgttattggccattctatgcaaaattgtctgcttaggcttaaagttgatacttctaaccctaagacacccaagtataaatttgtccgtatccaacctggtcaaacattttcagttctagcatgctacaatggttcaccatctggtgtttatcagtgtgccatgagacctaatcataccattaaaggttctttccttaatggatcatgtggtagtgttggttttaacattgattatgattgcgtgtctttctgctatatgcatcatatggagcttccaacaggagtacacgctggtactgacttagaaggtaaattctatggtccatttgttgacagacaaactgcacaggctgcaggtacagacacaaccataacattaaatgttttggcatggctgtatgctgctgttatcaatggtgataggtggtttcttaatagattcaccactactttgaatgactttaaccttgtggcaatgaagtacaactatgaacctttgacacaagatcatgttgacatattgggacctctttctgctcaaacaggaattgccgtcttagatatgtgtgctgctttgaaagagctgctgcagaatggtatgaatggtcgtactatccttggtagcactattttagaagatgagtttacaccatttgatgttgttagacaatgctctggtgttaccttccaaggtaagttcaagaaaattgttaagggcactcatcattggatgcttttaactttcttgacatcactattgattcttgttcaaagtacacagtggtcactgtttttctttgtttacgagaatgctttcttgccatttactcttggtattatggcaattgctgcatgtgctatgctgcttgttaagcataagcacgcattcttgtgcttgtttctgttaccttctcttgcaacagttgcttactttaatatggtctacatgcctgctagctgggtgatgcgtatcatgacatggcttgaattggctgacactagcttgtctggttataggcttaaggattgtgttatgtatgcttcagctttagttttgcttattctcatgacagctcgcactgtttatgatgatgctgctagacgtgtttggacactgatgaatgtcattacacttgtttacaaagtctactatggtaatgctttagatcaagctatttccatgtgggccttagttatttctgtaacctctaactattctggtgtcgttacgactatcatgtttttagctagagctatagtgtttgtgtgtgttgagtattacccattgttatttattactggcaacaccttacagtgtatcatgcttgtttattgtttcttaggctattgttgctgctgctactttggccttttctgtttactcaaccgttacttcaggcttactcttggtgtttatgactacttggtctctacacaagaatttaggtatatgaactcccaggggcttttgcctcctaagagtagtattgatgctttcaagcttaacattaagttgttgggtattggaggtaaaccatgtatcaaggttgctactgtacagtctaaaatgtctgacgtaaagtgcacatctgtggtactgctctcggttcttcaacaacttagagtagagtcatcttctaaattgtgggcacaatgtgtacaactccacaatgatattcttcttgcaaaagacacaactgaagctttcgagaagatggtttctcttttgtctgttttgctatccatgcagggtgctgtagacattaataggttgtgcgaggaaatgctcgataaccgtgctactcttcaggctattgcttcagaatttagttctttaccatcatatgccgcttatgccactgcccaggaggcctatgagcaggctgtagctaatggtgattctgaagtcgttctcaaaaagttaaagaaatctttgaatgtggctaaatctgagtttgaccgtgatgctgccatgcaacgcaagttggaaaagatggcagatcaggctatgacccaaatgtacaaacaggcaagatctgaggacaagagggcaaaagtaactagtgctatgcaaacaatgctcttcactatgcttaggaagcttgataatgatgcacttaacaacattatcaacaatgcgcgtgatggttgtgttccactcaacatcataccattgactacagcagccaaactcatggttgttgtccctgattatggtacctacaagaacacttgtgatggtaacacctttacatatgcatctgcactctgggaaatccagcaagttgttgatgcggatagcaagattgttcaacttagtgaaattaacatggacaattcaccaaatttggcttggcctcttattgttacagctctaagagccaactcagctgttaaactacagaataatgaactgagtccagtagcactacgacagatgtcctgtgcggctggtaccacacaaacagcttgtactgatgacaatgcacttgcctactataacaattcgaagggaggtaggtttgtgctggcattactatcagaccaccaagatctcaaatgggctagattccctaagagtgatggtacaggtacaatttacacagaactggaaccaccttgtaggtttgttacagacacaccaaaagggcctaaagtgaaatacttgtacttcatcaaaggcttaaacaacctaaatagaggtatggtgctgggcagtttagctgctacagtacgtcttcaggctggaaatgctacagaagtacctgccaattcaactgtgctttccttctgtgcttttgcagtagaccctgctaaagcatataaggattacctagcaagtggaggacaaccaatcaccaactgtgtgaagatgttgtgtacacacactggtacaggacaggcaattactgtaacaccagaagctaacatggaccaagagtcctttggtggtgcttcatgttgtctgtattgtagatgccacattgaccatccaaatcctaaaggattctgtgacttgaaaggtaagtacgtccaaatacctaccacttgtgctaatgacccagtgggttttacacttagaaacacagtctgtaccgtctgcggaatgtggaaaggttatggctgtagttgtgaccaactccgcgaacccttgatgcagtctgcggatgcatcaacgtttttaaacgggtttgcggtgtaagtgcagcccgtcttacaccgtgcggcacaggcactagtactgatgtcgtctacagggcttttgatatttacaacgaaaaagttgctggttttgcaaagttcctaaaaactaattgctgtcgcttccaggagaaggatgaggaaggcaatttattagactcttactttgtagttaagaggcatactatgtctaactaccaacatgaagagactatttataacttggttaaagattgtccagcggttgctgtccatgactttttcaagtttagagtagatggtgacatggtaccacatatatcacgtcagcgtctaactaaatacacaatggctgatttagtctatgctctacgtcattttgatgagggtaattgtgatacattaaaagaaatactcgtcacatacaattgctgtgatgatgattatttcaataagaaggattggtatgacttcgtagagaatcctgacatcttacgcgtatatgctaacttaggtgagcgtgtacgccaatcattattaaagactgtacaattctgcgatgctatgcgtgatgcaggcattgtaggcgtactgacattagataatcaggatcttaatgggaactggtacgatttcggtgatttcgtacaagtagcaccaggctgcggagttcctattgtggattcatattactcattgctgatgcccatcctcactttgactagggcattggctgctgagtcccatatggatgctgatctcgcaaaaccacttattaagtgggatttgctgaaatatgattttacggaagagagactttgtctcttcgaccgttattttaaatattgggaccagacataccatcccaattgtattaactgtttggatgataggtgtatccttcattgtgcaaactttaatgtgttattttctactgtgtttccacctacaagttttggaccactagtaagaaaaatatttgtagatggtgttccttttgttgtttcaactggataccattttcgtgagttaggagtcgtacataatcaggatgtaaacttacatagctcgcgtctcagtttcaaggaacttttagtgtatgctgctgatccagctatgcatgcagcttctggcaatttattgctagataaacgcactacatgcttttcagtagctgcactaacaaacaatgttgcttttcaaactgtcaaacccggtaattttaataaagacttttatgactttgctgtgtctaaaggtttctttaaggaaggaagttctgttgaactaaaacacttcttctttgctcaggatggcaacgctgctatcagtgattatgactattatcgttataatctgccaacaatgtgtgatatcagacaactcctattcgtagttgaagttgttgataaatactttgattgttacgatggtggctgtattaatgccaaccaagtaatcgttaacaatctggataaatcagctggtttcccatttaataaatggggtaaggctagactttattatgactcaatgagttatgaggatcaagatgcacttttcgcgtatactaagcgtaatgtcatccctactataactcaaatgaatcttaagtatgccattagtgcaaagaatagagctcgcaccgtagctggtgtctctatctgtagtactatgacaaatagacagtttcatcagaaattattgaagtcaatagccgccactagaggagctactgtggtaattggaacaagcaagttttacggtggctggcataatatgttaaaaactgtttacagtgatgtagaaactccacaccttatgggttgggattatccaaaatgtgacagagccatgcctaacatgcttaggataatggcctctcttgttcttgctcgcaaacataacacttgctgtaacttatcacaccgtttctacaggttagctaacgagtgtgcgcaagtattaagtgagatggtcatgtgtggcggctcactatatgttaaaccaggtggaacatcatccggtgatgctacaactgcttatgctaatagtgtctttaacatttgtcaagctgttacagccaatgtaaatgcacttctttcaactgatggtaataagatagctgacaagtatgtccgcaatctacaacacaggctctatgagtgtctctatagaaatagggatgttgatcatgaattcgtggatgagttttacgcttacctgcgtaaacatttctccatgatgattctttctgatgatgccgttgtgtgctataacagtaactatgcggctcaaggtttagtagctagcattaagaactttaaggcagttctttattatcaaaataatgtgttcatgtctgaggcaaaatgttggactgagactgaccttactaaaggacctcacgaattttgctcacagcatacaatgctagttaaacaaggagatgattacgtgtacctgccttacccagatccatcaagaatattaggcgcaggctgttttgtcgatgatattgtcaaaacagatggtacacttatgattgaaaggttcgtgtcactggctattgatgcttacccacttacaaaacatcctaatcaggagtatgctgatgtctttcacttgtatttacaatacattagaaagttacatgatgagcttactggccacatgttggacatgtattccgtaatgctaactaatgataacacctcacggtactgggaacctgagttttatgaggctatgtacacaccacatacagtcttgcaggctgtaggtgcttgtgtattgtgcaattcacagacttcacttcgttgcggtgcctgtattaggagaccattcctatgttgcaagtgctgctatgaccatgtcatttcaacatcacacaaattagtgttgtctgttaatccctatgtttgcaatgccccaggttgtgatgtcactgatgtgacacaactgtatctaggaggtatgagctattattgcaagtcacataagcctcccattagttttccattatgtgctaatggtcaggtttttggtttatacaaaaacacatgtgtaggcagtgacaatgtcactgacttcaatgcgatagcaacatgtgattggactaatgctggcgattacatacttgccaacacttgtactgagagactcaagcttttcgcagcagaaacgctcaaagccactgaggaaacatttaagctgtcatatggtattgccactgtacgcgaagtactctctgacagagaattgcatctttcatgggaggttggaaaacctagaccaccattgaacagaaactatgtctttactggttaccgtgtaactaaaaatagtaaagtacagattggagagtacacctttgaaaaaggtgactatggtgatgctgttgtgtacagaggtactacgacatacaagttgaatgttggtgattactttgtgttgacatctcacactgtaatgccacttagtgcacctactctagtgccacaagagcactatgtgagaattactggcttgtacccaacactcaacatctcagatgagttttctagcaatgttgcaaattatcaaaaggtcggcatgcaaaagtactctacactccaaggaccacctggtactggtaagagtcattttgccatcggacttgctctctattacccatctgctcgcatagtgtatacggcatgctctcatgcagctgttgatgccctatgtgaaaaggcattaaaatatttgcccatagataaatgtagtagaatcatacctgcgcgtgcgcgcgtagagtgttttgataaattcaaagtgaattcaacactagaacagtatgttttctgcactgtaaatgcattgccagaaacaactgctgacattgtagtctttgatgaaatctctatggctactaattatgacttgagtgttgtcaatgctagacttcgtgcaaaacactacgtctatattggcgatcctgctcaattaccagccccccgcacattgctgactaaaggcacactagaaccagaatattttaattcagtgtgcagacttatgaaaacaataggtccagacatgttccttggaacttgtcgccgttgtcctgctgaaattgttgacactgtgagtgctttagtttatgacaataagctaaaagcacacaaggataagtcagctcaatgcttcaaaatgttctacaaaggtgttattacacatgatgtttcatctgcaatcaacagacctcaaataggcgttgtaagagaatttcttacacgcaatcctgcttggagaaaagctgtttttatctcaccttataattcacagaacgctgtagcttcaaaaatcttaggattgcctacgcagactgttgattcatcacagggttctgaatatgactatgtcatattcacacaaactactgaaacagcacactcttgtaatgtcaaccgcttcaatgtggctatcacaagggcaaaaattggcattttgtgcataatgtctgatagagatctttatgacaaactgcaatttacaagtctagaaataccacgtcgcaatgtggctacattacaagcagaaaatgtaactggactttttaaggactgtagtaagatcattactggtcttcatcctacacaggcacctacacacctcagcgttgatataaagttcaagactgaaggattatgtgttgacataccaggcataccaaaggacatgacctaccgtagactcatctctatgatgggtttcaaaatgaattaccaagtcaatggttaccctaatatgtttatcacccgcgaagaagctattcgtcacgttcgtgcgtggattggctttgatgtagagggctgtcatgcaactagagatgctgtgggtactaacctacctctccagctaggattttctacaggtgttaacttagtagctgtaccgactggttatgttgacactgaaaataacacagaattcaccagagttaatgcaaaacctccaccaggtgaccagtttaaacatcttataccactcatgtataaaggcttgccctggaatgtagtgcgtattaagatagtacaaatgctcagtgatacactgaaaggattgtcagacagagtcgtgttcgtcctttgggcgcatggctttgagcttacatcaatgaagtactttgtcaagattggacctgaaagaacgtgttgtctgtgtgacaaacgtgcaacttgcttttctacttcatcagatacttatgcctgctggaatcattctgtgggttttgactatgtctataacccatttatgattgatgttcagcagtggggctttacgggtaaccttcagagtaaccatgaccaacattgccaggtacatggaaatgcacatgtggctagttgtgatgctatcatgactagatgtttagcagtccatgagtgctttgttaagcgcgttgattggtctgttgaataccctattataggagatgaactgagggttaattctgcttgcagaaaagtacaacacatggttgtgaagtctgcattgcttgctgataagtttccagttcttcatgacattggaaatccaaaggctatcaagtgtgtgcctcaggctgaagtagaatggaagttctacgatgctcagccatgtagtgacaaagcttacaaaatagaggaactcttctattcttatgctatacatcacgataaattcactgatggtgtttgtttgttttggaattgtaacgttgatcgttacccagccaatgcaattgtgtgtaggtttgacacaagagtcttgtcaaacttgaacttaccaggctgtgatggtggtagtttgtatgtgaataagcatgcattccacactccagctttcgataaaagtgcatttactaatttaaagcaattgcctttcttttactattctgatagtccttgtgagtctcatggcaaacaagtagtgtcggatattgattatgttccactcaaatctgctacgtgtattacacgatgcaatttaggtggtgctgtttgcagacaccatgcaaatgagtaccgacagtacttggatgcatataatatgatgatttctgctggatttagcctatggatttacaaacaatttgatacttataacctgtggaatacatttaccaggttacagagtttagaaaatgtggcttataatgttgttaataaaggacactttgatggacacgccggcgaagcacctgtttccatcattaataatgctgtttacacaaaggtagatggtattgatgtggagatctttgaaaataagacaacacttcctgttaatgttgcatttgagctttgggctaagcgtaacattaaaccagtgccagagattaagatactcaataatttgggtgttgatatcgctgctaatactgtaatctgggactacaaaagagaagccccagcacatgtatctacaataggtgtctgcacaatgactgacattgccaagaaacctactgagagtgcttgttcttcacttactgtcttgtttgatggtagagtggaaggacaggtagacctttttagaaacgcccgtaatggtgttttaataacagaaggttcagtcaaaggtctaacaccttcaaagggaccagcacaagctagcgtcaatggagtcacattaattggagaatcagtaaaaacacagtttaactactttaagaaagtagacggcattattcaacagttgcctgaaacctactttactcagagcagagacttagaggattttaagcccagatcacaaatggaaactgactttctcgagctcgctatggatgaattcatacagcgatataagctcgagggctatgccttcgaacacatcgtttatggagatttcagtcatggacaacttggcggtcttcatttaatgataggcttagccaagcgctcacaagattcaccacttaaattagaggattttatccctatggacagcacagtgaaaaattacttcataacagatgcgcaaacaggttcatcaaaatgtgtgtgttctgtgattgatcttttacttgatgactttgtcgagataataaagtcacaagatttgtcagtgatttcaaaagtggtcaaggttacaattgactatgctgaaatttcattcatgctttggtgtaaggatggacatgttgaaaccttctacccaaaactacaagcaagtcaagcgtggcaaccaggtgttgcgatgcctaacttgtacaagatgcaaagaatgcttcttgaaaagtgtgaccttcagaattatggtgaaaatgctgttataccaaaagnaataatgatgaatgtcgcaaagtatactcaactgtgtcaatacttaaatacacttactttagctgtaccctacaacatgagagttattcactttggtgctggctctgataaaggagttgcaccaggtacagctgtgctcagacaatggttgccaactggcacactacttgtcgattcagatcttaatgacttcgtctccgacgcagattctactttaattggagactgtgcaacagtacatacggctaataaatgggaccttattattagcgatatgtatgaccctaggaccaaacatgtgacaaaagagaatgactctaaagaagggtttttcacttatctgtgtggatttataaagcaaaaactagccctgggtggttctatagctgtaaagataacagagcattcttggaatgctgacctttacaagcttatgggccatttctcatggtggacagcttttgttacaaatgtaaatgcatcatcatcggaagcatttttaattggggctaactatcttggcaagccgaaggaacaaattgatggctataccatgcatgctaactacattttctggaggaacacaaatcctatccagttgtcttcctattcactctttgacatgagcaaatttcctcttaaattaagaggaactgctgtaatgtctcttaaggagaatcaaatcaatgatatgatttattctcttctggaaaaaggtaggcttatcattagagaaaacaacagagttgtggtttcaagtgatattcttgttaacaactaaacgaacatgtttattttcttattatttcttactctcactagtggtagtgaccttgaccggtgcaccacttttgatgatgttcaagctcctaattacactcaacatacttcatctatgaggggggtttactatcctgatgaaatttttagatcagacactctttatttaactcaggatttatttcttccattttattctaatgttacagggtttcatactattaatcatacgtttggcaaccctgtcataccttttaaggatggtatttattttgctgccacagagaaatcaaatgttgtccgtggttgggtttttggttctaccatgaacaacaagtcacagtcggtgattattattaacaattctactaatgttgttatacgagcatgtaactttgaattgtgtgacaaccctttctttgctgtttctaaacccatgggtacacagacacatactatgatattcgataatgcatttaattgcactttcgagtacatatctgatgccttttcgcttgatgtttcagaaaagtcaggtaattttaaacacttacgagagtttgtgtttaaaaataaagatgggtttctctatgtttataagggctatcaacctatagatgtagttcgtgatctaccttctggttttaacactttgaaacctatttttaagttgcctcttggtattaacattacaaattttagagccattcttacagccttttcacctgctcaagacatttggggcacgtcagctgcagcctattttgttggctatttaaagccaactacatttatgctcaagtatgatgaaaatggtacaatcacagatgctgttgattgttctcaaaatccacttgctgaactcaaatgctctgttaagagctttgagattgacaaaggaatttaccagacctctaatttcagggttgttccctcaggagatgttgtgagattccctaatattacaaacttgtgtccttttggagaggtttttaatgctactaaattcccttctgtctatgcatgggagagaaaaaaaatttctaattgtgttgctgattactctgtgctctacaactcaacatttttttcaacctttaagtgctatggcgtttctgccactaagttgaatgatctttgcttctccaatgtctatgcagattcttttgtagtcaagggagatgatgtaagacaaatagcgccaggacaaactggtgttattgctgattataattataaattgccagatgatttcatgggttgtgtccttgcttggaatactaggaacattgatgctacttcaactggtaattataattataaatataggtatcttagacatggcaagcttaggccctttgagagagacatatctaatgtgcctttctcccctgatggcaaaccttgcaccccacctgctcttaattgttattggccattaaatgattatggtttttacaccactactggcattggctaccaaccttacagagttgtagtactttcttttgaacttttaaatgcaccggccacggtttgtggaccaaaattatccactgaccttattaagaaccagtgtgtcaattttaattttaatggactcactggtactggtgtgttaactccttcttcaaagagatttcaaccatttcaacaatttggccgtgatgtttctgatttcactgattccgttcgagatcctaaaacatctgaaatattagacatttcaccttgctcttttgggggtgtaagtgtaattacacctggaacaaatgcttcatctgaagttgctgttctatatcaagatgttaactgcactgatgtttctacagcaattcatgcagatcaactcacaccagcttggcgcatatattctactggaaacaatgtattccagactcaagcaggctgtcttataggagctgagcatgtcgacacttcttatgagtgcgacattcctattggagctggcatttgtgctagttaccatacagtttctttattacgtagtactagccaaaaatctattgtggcttatactatgtctttaggtgctgatagttcaattgcttactctaataacaccattgctatacctactaacttttcaattagcattactacagaagtaatgcctgtttctatggctaaaacctccgtagattgtaatatgtacatctgcggagattctactgaatgtgctaatttgcttctccaatatggtagcttttgcacacaactaaatcgtgcactctcaggtattgctgctgaacaggatcgcaacacacgtgaagtgttcgctcaagtcaaacaaatgtacaaaaccccaactttgaaatattttggtggttttaatttttcacaaatattacctgaccctctaaagccaactaagaggtcttttattgaggacttgctctttaataaggtgacactcgctgatgctggcttcatgaagcaatatggcgaatgcctaggtgatattaatgctagagatctcatttgtgcgcagaagttcaatggacttacagtgttgccacctctgctcactgatgatatgattgctgcctacactgctgctctagttagtggtactgccactgctggatggacatttggtgctggcgctgctcttcaaataccttttgctatgcaaatggcatataggttcaatggcattggagttacccaaaatgttctctatgagaaccaaaaacaaatcgccaaccaatttaacaaggcgattagtcaaattcaagaatcacttacaacaacatcaactgcattgggcaagctgcaagacgttgttaaccagaatgctcaagcattaaacacacttgttaaacaacttagctctaattttggtgcaatttcaagtgtgctaaatgatatcctttcgcgacttgataaagtcgaggcggaggtacaaattgacaggttaattacaggcagacttcaaagccttcaaacctatgtaacacaacaactaatcagggctgctgaaatcagggcttctgctaatcttgctgctactaaaatgtctgagtgtgttcttggacaatcaaaaagagttgacttttgtggaaagggctaccaccttatgtccttcccacaagcagccccgcatggtgttgtcttcctacatgtcacgtatgtgccatcccaggagaggaacttcaccacagcgccagcaatttgtcatgaaggcaaagcatacttccctcgtgaaggtgtttttgtgtttaatggcacttcttggtttattacacagaggaacttcttttctccacaaataattactacagacaatacatttgtctcaggaaattgtgatgtcgttattggcatcattaacaacacagtttatgatcctctgcaacctgagcttgactcattcaaagaagagctggacaagtacttcaaaaatcatacatcaccagatgttgatcttggcgacatttcaggcattaacgcttctgtcgtcaacattcaaaaagaaattgaccgcctcaatgaggtcgctaaaaatttaaatgaatcactcattgaccttcaagaattgggaaaatatgagcaatatattaaatggccttggtatgtttggctcggcttcattgctggactaattgccatcgtcatggttacaatcttgctttgttgcatgactagttgttgcagttgcctcaagggtgcatgctcttgtggttcttgctgcaagtttgatgaggatgactctgagccagttctcaagggtgtcaaattacattacacataaacgaacttatggatttgtttatgagattttttactcttggatcaattactgcacagccagtaaaaattgacaatgcttctcctgcaagtactgttcatgctacagcaacgataccgctacaagcctcactccctttcggatggcttgttattggcgttgcatttcttgctgtttttcagagcgctaccaaaataattgcgctcaataaaagatggcagctagccctttataagggcttccagttcatttgcaatttactgctgctatttgttaccatctattcacatcttttgcttgtcgctgcaggtatggaggcgcaatttttgtacctctatgccttgatatattttctacaatgcatcaacgcatgtagaattattatgagatgttggctttgttggaagtgcaaatccaagaacccattactttatgatgccaactactttgtttgctggcacacacataactatgactactgtataccatataacagtgtcacagatacaattgtcgttactgaaggtgacggcatttcaacaccaaaactcaaagaagactaccaaattggtggttattctgaggataggcactcaggtgttaaagactatgtcgttgtacatggctatttcaccgaagtttactaccagcttgagtctacacaaattactacagacactggtattgaaaatgctacattcttcatctttaacaagcttgttaaagacccaccgaatgtgcaaatacacacaatcgacggctcttcaggagttgctaatccagcaatggatccaatttatgatgagccgacgacgactactagcgtgcctttgtaagcacaagaaagtgagtacgaacttatgtactcattcgtttcggaagaaacaggtacgttaatagttaatagcgtacttctttttcttgctttcgtggtattcttgctagtcacactagccatccttactgcgcttcgattgtgtgcgtactgctgcaatattgttaacgtgagtttagtaaaaccaacggtttacgtctactcgcgtgttaaaaatctgaactcttctgaaggagttcctgatcttctggtctaaacgaactaactattattattattctgtttggaactttaacattgcttatcatggcagacaacggtactattaccgttgaggagcttaaacaactcctggaacaatggaacctagtaataggtttcctattcctagcctggattatgttactacaatttgcctattctaatcggaacaggtttttgtacataataaagcttgttttcctctggctcttgtggccagtaacacttgcttgttttgtgcttgctgctgtctacagaattaattgggtgactggcgggattgcgattgcaatggcttgtattgtaggcttgatgtggcttagctacttcgttgcttccttcaggctgtttgctcgtacccgctcaatgtggtcattcaacccagaaacaaacattcttctcaatgtgcctctccgggggacaattgtgaccagaccgctcatggaaagtgaacttgtcattggtgctgtgatcattcgtggtcacttgcgaatggccggacactccctagggcgctgtgacattaaggacctgccaaaagagatcactgtggctacatcacgaacgctttcttattacaaattaggagcgtcgcagcgtgtaggcactgattcaggttttgctgcatacaaccgctaccgtattggaaactataaattaaatacagaccacgccggtagcaacgacaatattgctttgctagtacagtaagtgacaacagatgtttcatcttgttgacttccaggttacaatagcagagatattgattatcattatgaggactttcaggattgctatttggaatcttgacgttataataagttcaatagtgagacaattatttaagcctctaactaagaagaattattcggagttagatgatgaagaacctatggagttagattatccataaaacgaacatgaaaattattctcttcctgacattgattgtatttacatcttgcgagctatatcactatcaggagtgtgttagaggtacgactgtactactaaaagaaccttgcccatcaggaacatacgagggcaattcaccatttcaccctcttgctgacaataaatttgcactaacttgcactagcacacactttgcttttgcttgtgctgacggtactcgacatacctatcagctgcgtgcaagatcagtttcaccaaaacttttcatcagacaagaggaggttcaacaagagctctactcgccactttttctcattgttgctgctctagtatttttaatactttgcttcaccattaagagaaagacagaatgaatgagctcactttaattgacttctatttgtgctttttagcctttctgctattccttgttttaataatgcttattatattttggttttcactcgaaatccaggatctagaagaaccttgtaccaaagtctaaacgaacatgaaacttctcattgttttgacttgtattttgcagttgcatatgcactgtagtacagcgctgtgcatctaataaacctcatgtgcttgaagatccttgtaaggtacaacactaggggtaatacttatagcactgcttggctttgtgctctaggaaaggttttaccttttcatagatggcacactatggttcaaacatgcacacctaatgttactatcaactgtcaagatccagctggtggtgcgcttatagctaggtgttggtaccttcatgaaggtcaccaaactgctgcatttagagacgtacttgttgttttaaataaacgaacaaattaaaatgtctgataatggaccccaatcaaaccaacgtagtgccccccgcattacatttggtggacccacagattcaactgacaataaccagaatggaggacgcaatggggcaaggccaaaacagcgccgaccccaaggtttacccaataatactgcgtcttggttcacagctctcactcagcatggcaaggaggaacttagattccctcgaggccagggcgttccaatcaacaccaatagtggtccagatgaccaaattggctactaccgaagagctacccgacgagttcgtggtggtgacggcaaaatgaaagagctcagccccagatggtacttctattacctaggaactggcccagaagcttcacttccctacggcgctaacaaagaaggcatcgtatgggttgcaactgagggagccttgaatacacccaaagaccacattggcacccgcaatcctaataacaatgctgccaccgtgctacaacttcctcaaggaacaacattgccaaaaggcttctacgcagagggaagcagaggcggcagtcaagcctcttctcgctcctcatcacgtagtcgcggtaattcaagaaattcaactcctggcagcagtaggggaaattctcctgctcgaatggctagcggaggtggtgaaactgccctcgcgctattgctgctagacagattgaaccagcttgagagcaaagtttctggtaaaggccaacaacaacaaggccaaactgtcactaagaaatctgctgctgaggcatctaaaaagcctcgccaaaaacgtactgccacaaaacagtacaacgtcactcaagcatttgggagacgtggtccagaacaaacccaaggaaatttcggggaccaagacctaatcagacaaggaactgattacaaacattggccgcaaattgcacaatttgctccaagtgcctctgcattctttggaatgtcacgcattggcatggaagtcacaccttcgggaacatggctgacttatcatggagccattaaattggatgacaaagatccacaattcaaagacaacgtcatactgctgaacaagcacattgacgcatacaaaacattcccaccaacagagcctaaaaaggacaaaaagaaaaagactgatgaagctcagcctttgccgcagagacaaaagaagcagcccactgtgactcttcttcctgcggctgacatggatgatttctccagacaacttcaaaattccatgagtggagcttctgctgattcaactcaggcataaacactcatgatgaccacacaaggcagatgggctatgtaaacgttttcgcaattccgtttacgatacatagtctactcttgtgcagaatgaattctcgtaactaaacagcacaagtaggtttagttaactttaatctcacatagcaatctttaatcaatgtgtaacattagggaggacttgaaagagccaccacattttcatcgaggccacgcggagtacgatcgagggtacagtgaataatgctagggagagctgcctatatggaagagccctaatgtgtaaaattaattttagtagtgctatccccatgtgattttaatagcttcttaggagaatgac

SEQ ID NO: 29757 - DNA, 29711 bp, SARS Coronavirus
tacccaggaaaagccaaccaacctcgatctcttgtagatctgttctctaaacgaactttaaaatctgtgtagctgtcgctcggctgcatgcctagtgcacctacgcagtataaacaataataaattttactgtcgttgacaagaaacgagtaactcgtccctcttctgcagactgcttacggtttcgtccgtgttgcagtcgatcatcagcatacctaggtttcgtccgggtgtgaccgaaaggtaagatggagagccttgttcttggtgtcaacgagaaaacacacgtccaactcagtttgcctgtccttcaggttagagacgtgctagtgcgtggcttcggggactctgtggaagaggccctatcggaggcacgtgaacacctcaaaaatggcacttgtggtctagtagagctggaaaaaggcgtactgccccagcttgaacagccctatgtgttcattaaacgttctgatgccttaagcaccaatcacggccacaaggtcgttgagctggttgcagaaatggacggcattcagtacggtcgtagcggtataacactgggagtactcgtgccacatgtgggcgaaaccccaattgcataccgcaatgttcttcttcgtaagaacggtaataagggagccggtggtcatagctatggcatcgatctaaagtcttatgacttaggtgacgagcttggcactgatcccattgaagattatgaacaaaactggaacactaagcatggcagtggtgcactccgtgaactcactcgtgagctcaatggaggtgcagtcactcgctatgtcgacaacaatttctgtggcccagatgggtaccctcttgattgcatcaaagattttctcgcacgcgcgggcaagtcaatgtgcactctttccgaacaacttgattacatcgagtcgaagagaggtgtctactgctgccgtgaccatgagcatgaaattgcctggttcactgagcgctctgataagagctacgagcaccagacacccttcgaaattaagagtgccaagaaatttgacactttcaaaggggaatgcccaaagtttgtgtttcctcttaactcaaaagtcaaagtcattcaaccacgtgttgaaaagaaaaagactgagggtttcatggggcgtatacgctctgtgtaccctgttgcatctccacaggagtgtaacaatatgcacttgtctaccttgatgaaatgtaatcattgcgatgaagtttcatggcagacgtgcgactttctgaaagccacttgtgaacattgtggcactgaaaatttagttattgaaggacctactacatgtgggtacctacctactaatgctgtagtgaaaatgccatgtcctgcctgtcaagacccagagattggacctgagcatagtgttgcagattatcacaaccactcaaacattgaaactcgactccgcaagggaggtaggactagatgttttggaggctgtgtgtttgcctatgttggctgctataataagcgtgcctactgggttcctcgtgctagtgctgatattggctcaggccatactggcattactggtgacaatgtggagaccttgaatgaggatctccttgagatactgagtcgtgaacgtgttaacattaacattgttggcgattttcatttgaatgaagaggttgccatcattttggcatctttctctgcttctacaagtgcctttattgacactataaagagtcttgattacaagtctttcaaaaccattgttgagtcctgcggtaactataaagttaccaagggaaagcccgtaaaaggtgcttggaacattggacaacagagatcagttttaacaccactgtgtggttttccctcacaggctgctggtgttatcagatcaatttttgcgcgcacacttgatgcagcaaaccactcaattcctgatttgcaaagagcagctgtcaccatacttgatggtatttctgaacagtcattacgtcttgtcgacgccatggtttatacttcagacctgctcaccaacagtgtcattattatggcatatgtaactggtggtcttgtacaacagacttctcagtggttgtctaatcttttgggcactactgttgaaaaactcaggcctatctttgaatggattgaggcgaaacttagtgcaggagttgaatttctcaaggatgcttgggagattctcaaatttctcattacaggtgtttttgacatcgtcaagggtcaaatacaggttgcttcagataacatcaaggattgtgtaaaatgcttcattgatgttgttaacaaggcactcgaaatgtgcattgatcaagtcactatcgctggcgcaaagttgcgatcactcaacttaggtgaagtcttcatcgctcaaagcaagggactttaccgtcagtgtatacgtggcaaggagcagctgcaactactcatgcctcttaaggcaccaaaagaagtaacctttcttgaaggtgattcacatgacacagtacttacctctgaggaggttgttctcaagaacggtgaactcgaagcactcgagacgcccgttgatagcttcacaaatggagctatcgttggcacaccagtctgtgtaaatggcctcatgctcttagagattaaggacaaagaacaatactgcgcattgtctcctggtttactggctacaaacaatgtctttcgcttaaaagggggtgcaccaattaaaggtgtaacctttggagaagatactgtttgggaagttcaaggttacaagaatgtgagaatcacatttgagcttgatgaacgtgttgacaaagtgcttaatgaaaagtgctctgtctacactgttgaatccggtaccgaagttactgagtttgcatgtgttgtagcagaggctgttgtgaagactttacaaccagtttctgatctccttaccaacatgggtattgatcttgatgagtggagtgtagctacattctacttatttgatgatgctggtgaagaaaacttttcatcacgtatgtattgttccttttaccctccagatgaggaagaagaggacgatgcagagtgtgaggaagaagaaattgatgaaacctgtgaacatgagtacggtacagaggatgattatcaaggtctccctctggaatttggtgcctcagctgaaacagttcgagttgaggaagaagaagaggaagactggctggatgatactactgagcaatcagagattgagccagaaccagaacctacacctgaagaaccagttaatcagtttactggttatttaaaacttactgacaatgttgccattaaatgtgttgacatcgttaaggaggcacaaagtgctaatcctatggtgattgtaaatgctgctaacatacacctgaaacatggtggtggtgtagcaggtgcactcaacaaggcaaccaatggtgccatgcaaaaggagagtgatgattacattaagctaaatggccctcttacagtaggagggtcttgtttgctttctggacataatcttgctaagaagtgtctgcatgttgttggacctaacctaaatgcaggtgaggacatccagcttcttaaggcagcatatgaaaatttcaattcacaggacatcttacttgcaccattgttgtcagcaggcatatttggtgctaaaccacttcagtctttacaagtgtgcgtgcagacggttcgtacacaggtttatattgcagtcaatgacaaagctctttatgagcaggttgtcatggattatcttgataacctgaagcctagagtggaagcacctaaacaagaggagccaccaaacacagaagattccaaaactgaggagaaatctgtcgtacagaagcctgtcgatgtgaagccaaaaattaaggcctgcattgatgaggttaccacaacactggaagaaactaagtttcttaccaataagttactcttgtttgctgatatcaatggtaagctttaccatgattctcagaacatgcttagaggtgaagatatgtctttccttgagaaggatgcaccttacatggtaggtgatgttatcactagtggtgatatcacttgtgttgtaataccctccaaaaaggctggtggcactactgagatgctctcaagagctttgaagaaagtgccagttgatgagtatataaccacgtaccctggacaaggatgtgctggttatacacttgaggaagctaagactgctcttaagaaatgcaaatctgcattttatgtactaccttcagaagcacctaatgctaaggaagagattctaggaactgtatcctggaatttgagagaaatgcttgctcatgctgaagagacaagaaaattaatgcctatatgcatggatgttagagccataatggcaaccatccaacgtaagtataaaggaattaaaattcaagagggcatcgttgactatggtgtccgattcttcttttatactagtaaagagcctgtagcttctattattacgaagctgaactctctaaatgagccgcttgtcacaatgccaattggttatgtgacacatggttttaatcttgaagaggctgcgcgctgtatgcgttctcttaaagctcctgccgtagtgtcagtatcatcaccagatgctgttactacatataatggatacctcacttcgtcatcaaagacatctgaggagcactttgtagaaacagtttctttggctggctcttacagagattggtcctattcaggacagcgtacagagttaggtgttgaatttcttaagcgtggtgacaaaattgtgtaccacactctggagagccccgtcgagtttcatcttgacggtgaggttctttcacttgacaaactaaagagtctcttatccctgcgggaggttaagactataaaagtgttcacaactgtggacaacactaatctccacacacagcttgtggatatgtctatgacatatggacagcagtttggtccaacatacttggatggtgctgatgttacaaaaattaaacctcatgtaaatcatgagggtaagactttctttgtactacctagtgatgacacactacgtagtgaagctttcgagtactaccatactcttgatgagagttttcttggtaggtacatgtctgctttaaaccacacaaagaaatggaaatttcctcaagttggtggtttaacttcaattaaatgggctgataacaattgttatttgtctagtgttttattagcacttcaacagcttgaagtcaaattcaatgcaccagcacttcaagaggcttattatagagcccgtgctggtgatgctgctaacttttgtgcactcatactcgcttacagtaataaaactgttggcgagcttggtgatgtcagagaaactatgacccatcttctacagcatgctaatttggaatctgcaaagcgagttcttaatgtggtgtgtaaacattgtggtcagaaaactactaccttaacgggtgtagaagctgtgatgtatatgggtactctatcttatgataatcttaagacaggtgtttccattccatgtgtgtgtggtcgtgatgctacacaatatctagtacaacaagagtcttcttttgttatgatgtctgcaccacctgctgagtataaattacagcaaggtacattcttatgtgcgaatgagtacactggtaactatcagtgtggtcattacactcatataactgctaaggagaccctctatcgtattgacggagctcaccttacaaagatgtcagagtacaaaggaccagtgactgatgttttctacaaggaaacatcttacactacaaccatcaagcctgtgtcgtataaactcgatggagttacttacacagagattgaaccaaaattggatgggtattataaaaaggataatgcttactatacagagcagcctatagaccttgtaccaactcaaccattaccaaatgcgagttttgataatttcaaactcacatgttctaacacaaaatttgctgatgatttaaatcaaatgacaggcttcacaaagccagcttcacgagagctatctgtcacattcttcccagacttgaatggcgatgtagtggctattgactatagacactattcagcgagtttcaagaaaggtgctaaattactgcataagccaattgtttggcacattaaccaggctacaaccaagacaacgttcaaaccaaacacttggtgtttacgttgtctttggagtacaaagccagtagatacttcaaattcatttgaagttctggcagtagaagacacacaaggaatggacaatcttgcttgtgaaagtcaacaacccacctctgaagaagtagtggaaaatcctaccatacagaaggaagtcatagagtgtgacgtgaaaactaccgaagttgtaggcaatgtcatacttaaaccatcagatgaaggtgttaaagtaacacaagagttaggtcatgaggatcttatggctgcttatgtggaaaacacaagcattaccattaagaaacctaatgagctttcactagccttaggtttaaaaacaattgccactcatggtattgctgcaattaatagtgttccttggagtaaaattttggcttatgtcaaaccattcttaggacaagcagcaattacaacatcaaattgcgctaagagattagcacaacgtgtgtttaacaattatatgccttatgtgtttacattattgttccaattgtgtacttttactaaaagtaccaattctagaattagagcttcactacctacaactattgctaaaaatagtgttaagagtgttgctaaattatgtttggatgccggcattaattatgtgaagtcacccaaattttctaaattgttcacaatcgctatgtggctattgttgttaagtatttgcttaggttctctaatctgtgtaactgctgcttttggtgtactcttatctaattttggtgctccttcttattgtaatggcgttagagaattgtatcttaattcgtctaacgttactactatggatttctgtgaaggttcttttccttgcagcatttgtttaagtggattagactcccttgattcttatccagctcttgaaaccattcaggtgacgatttcatcgtacaagctagacttgacaattttaggtctggccgctgagtgggttttggcatatatgttgttcacaaaattcttttatttattaggtctttcagctataatgcaggtgttctttggctattttgctagtcatttcatcagcaattcttggctcatgtggtttatcattagtattgtacaaatggcacccgtttctgcaatggttaggatgtacatcttctttgcttctttctactacatatggaagagctatgttcatatcatggatggttgcacctcttcgacttgcatgatgtgctataagcgcaatcgtgccacacgcgttgagtgtacaactattgttaatggcatgaagagatctttctatgtctatgcaaatggaggccgtggcttctgcaagactcacaattggaattgtctcaattgtgacacattttgcactggtagtacattcattagtgatgaagttgctcgtgatttgtcactccagtttaaaagaccaatcaaccctactgaccagtcatcgtatattgttgatagtgttgctgtgaaaaatggcgcgcttcacctctactttgacaaggctggtcaaaagacctatgagagacatccgctctcccattttgtcaatttagacaatttgagagctaacaacactaaaggttcactgcctattaatgtcatagtttttgatggcaagtccaaatgcgacgagtctgcttctaagtctgcttctgtgtactacagtcagctgatgtgccaacctattctgttgcttgaccaagctcttgtatcagacgttggagatagtactgaagtttccgttaagatgtttgatgcttatgtcgacaccttttcagcaacttttagtgttcctatggaaaaacttaaggcacttgttgctacagctcacagcgagttagcaaagggtgtagctttagatggtgtcctttctacattcgtgtcagctgcccgacaaggtgttgttgataccgatgttgacacaaaggatgttattgaatgtctcaaactttcacatcactctgacttagaagtgacaggtgacagttgtaacaatttcatgctcacctataataaggttgaaaacatgacgcccagagatcttggcgcatgtattgactgtaatgcaaggcatatcaatgcccaagtagcaaaaagtcacaatgtttcactcatctggaatgtaaaagactacatgtctttatctgaacagctgcgtaaacaaattcgtagtgctgccaagaagaacaacataccttttagactaacttgtgctacaactagacaggttgtcaatgtcataactactaaaatctcactcaagggtggtaagattgttagtacttgttttaaacttatgcttaaggccacattattgtgcgttcttgctgcattggtttgttatatcgttatgccagtacatacattgtcaatccatgatggttacacaaatgaaatcattggttacaaagccattcaggatggtgtcactcgtgacatcatttctactgatgattgttttgcaaataaacatgctggttttgacgcatggtttagccagcgtggtggttcatacaaaaatgacaaaagctgccctgtagtagctgctatcattacaagagagattggtttcatagtgcctggcttaccgggtactgtgctgagagcaatcaatggtgacttcttgcattttctacctcgtgtttttagtgctgttggcaacatttgctacacaccttccaaactcattgagtatagtgattttgctacctctgcttgcgttcttgctgctgagtgtacaatttttaaggatgctatgggcaaacctgtgccatattgttatgacactaatttgctagagggttctatttcttatagtgagcttcgtccagacactcgttatgtgcttatggatggttccatcatacagtttcctaacacttacctggagggttctgttagagtagtaacaacttttgatgctgagtactgtagacatggtacatgcgaaaggtcagaagtaggtatttgcctatctaccagtggtagatgggttcttaataatgagcattacagagctctatcaggagttttctgtggtgttgatgcgatgaatctcatagctaacatctttactcctcttgtgcaacctgtgggtgctttagatgtgtctgcttcagtagtggctggtggtattattgccatattggtgacttgtgctgcctactactttatgaaattcagacgtgtttttggtgagtacaaccatgttgttgctgctaatgcacttttgtttttgatgtctttcactatactctgtctggtaccagcttacagctttctgccgggagtctactcagtcttttacttgtacttgacattctatttcaccaatgatgtttcattcttggctcaccttcaatggtttgccatgttttctcctattgtgcctttttggataacagcaatctatgtattctgtatttctctgaagcactgccattggttctttaacaactatcttaggaaaagagtcatgtttaatggagttacatttagtaccttcgaggaggctgctttgtgtacctttttgctcaacaaggaaatgtacctaaaattgcgtagcgagacactgttgccacttacacagtataacaggtatcttgctctatataacaagtacaagtatttcagtggagccttagatactaccagctatcgtgaagcagcttgctgccacttagcaaaggctctaaatgactttagcaactcaggtgctgatgttctctaccaaccaccacagacatcaatcacttctgctgttctgcagagtggttttaggaaaatggcattcccgtcaggcaaagttgaagggtgcatggtacaagtaacctgtggaactacaactcttaatggattgtggttggatgacacagtatactgtccaagacatgtcatttgcacagcagaagacatgcttaatcctaactatgaagatctgctcattcgcaaatccaaccatagctttcttgttcaggctggcaatgttcaacttcgtgttattggccattctatgcaaaattgtctgcttaggcttaaagttgatacttctaaccctaagacacccaagtataaatttgtccgtatccaacctggtcaaacattttcagttctagcatgctacaatggttcaccatctggtgtttatcagtgtgccatgagacctaatcataccattaaaggttctttccttaatggatcatgtggtagtgttggttttaacattgattatgattgcgtgtctttctgctatatgcatcatatggagcttccaacaggagtacacgctggtactgacttagaaggtaaattctatggtccatttgttgacagacaaactgcacaggctgcaggtacagacacaaccataacattaaatgttttggcatggctgtatgctgctgttatcaatggtgataggtggtttcttaatagattcaccactactttgaatgactttaaccttgtggcaatgaagtacaactatgaacctttgacacaagatcatgttgacatattgggacctctttctgctcaaacaggaattgccgtcttagatatgtgtgctgctttgaaagagctgctgcagaatggtatgaatggtcgtactatccttggtagcactattttagaagatgagtttacaccatttgatgttgttagacaatgctctggtgttaccttccaaggtaagttcaagaaaattgttaagggcactcatcattggatgcttttaactttcttgacatcactattgattcttgttcaaagtacacagtggtcactgtttttctttgtttacgagaatgctttcttgccatttactcttggtattatggcaattgctgcatgtgctatgctgcttgttaagcataagcacgcattcttgtgcttgtttctgttaccttctcttgcaacagttgcttactttaatatggtctacatgcctgctagctgggtgatgcgtatcatgacatggcttgaattggctgacactagcttgtctggttataggcttaaggattgtgttatgtatgcttcagctttagttttgcttattctcatgacagctcgcactgtttatgatgatgctgctagacgtgtttggacactgatgaatgtcattacacttgtttacaaagtctactatggtaatgctttagatcaagctatttccatgtgggccttagttatttctgtaacctctaactattctggtgtcgttacgactatcatgtttttagctagagctatagtgtttgtgtgtgttgagtattacccattgttatttattactggcaacaccttacagtgtatcatgcttgtttattgtttcttaggctattgttgctgctgctactttggccttttctgtttactcaaccgttacttcaggcttactcttggtgtttatgactacttggtctctacacaagaatttaggtatatgaactcccaggggcttttgcctcctaagagtagtattgatgctttcaagcttaacattaagttgttgggtattggaggtaaaccatgtatcaaggttgctactgtacagtctaaaatgtctgacgtaaagtgcacatctgtggtactgctctcggttcttcaacaacttagagtagagtcatcttctaaattgtgggcacaatgtgtacaactccacaatgatattcttcttgcaaaagacacaactgaagctttcgagaagatggtttctcttttgtctgttttgctatccatgcagggtgctgtagacattaataggttgtgcgaggaaatgctcgataaccgtgctactcttcaggctattgcttcagaatttagttctttaccatcatatgccgcttatgccactgcccaggaggcctatgagcaggctgtagctaatggtgattctgaagtcgttctcaaaaagttaaagaaatctttgaatgtggctaaatctgagtttgaccgtgatgctgccatgcaacgcaagttggaaaagatggcagatcaggctatgacccaaatgtacaaacaggcaagatctgaggacaagagggcaaaagtaactagtgctatgcaaacaatgctcttcactatgcttaggaagcttgataatgatgcacttaacaacattatcaacaatgcgcgtgatggttgtgttccactcaacatcataccattgactacagcagccaaactcatggttgttgtccctgattatggtacctacaagaacacttgtgatggtaacacctttacatatgcatctgcactctgggaaatccagcaagttgttgatgcggatagcaagattgttcaacttagtgaaattaacatggacaattcaccaaatttggcttggcctcttattgttacagctctaagagccaactcagctgttaaactacagaataatgaactgagtccagtagcactacgacagatgtcctgtgcggctggtaccacacaaacagcttgtactgatgacaatgcacttgcctactataacaattcgaagggaggtaggtttgtgctggcattactatcagaccaccaagatctcaaatgggctagattccctaagagtgatggtacaggtacaatttacacagaactggaaccaccttgtaggtttgttacagacacaccaaaagggcctaaagtgaaatacttgtacttcatcaaaggcttaaacaacctaaatagaggtatggtgctgggcagtttagctgctacagtacgtcttcaggctggaaatgctacagaagtacctgccaattcaactgtgctttccttctgtgcttttgcagtagaccctgctaaagcatataaggattacctagcaagtggaggacaaccaatcaccaactgtgtgaagatgttgtgtacacacactggtacaggacaggcaattactgtaacaccagaagctaacatggaccaagagtcctttggtggtgcttcatgttgtctgtattgtagatgccacattgaccatccaaatcctaaaggattctgtgacttgaaaggtaagtacgtccaaatacctaccacttgtgctaatgacccagtgggttttacacttagaaacacagtctgtaccgtctgcggaatgtggaaaggttatggctgtagttgtgaccaactccgcgaacccttgatgcagtctgcggatgcatcaacgtttttaaacgggtttgcggtgtaagtgcagcccgtcttacaccgtgcggcacaggcactagtactgatgtcgtctacagggcttttgatatttacaacgaaaaagttgctggttttgcaaagttcctaaaaactaattgctgtcgcttccaggagaaggatgaggaaggcaatttattagactcttactttgtagttaagaggcatactatgtctaactaccaacatgaagagactatttataacttggttaaagattgtccagcggttgctgtccatgactttttcaagtttagagtagatggtgacatggtaccacatatatcacgtcagcgtctaactaaatacacaatggctgatttagtctatgctctacgtcattttgatgagggtaattgtgatacattaaaagaaatactcgtcacatacaattgctgtgatgatgattatttcaataagaaggattggtatgacttcgtagagaatcctgacatcttacgcgtatatgctaacttaggtgagcgtgtacgccaatcattattaaagactgtacaattctgcgatgctatgcgtgatgcaggcattgtaggcgtactgacattagataatcaggatcttaatgggaactggtacgatttcggtgatttcgtacaagtagcaccaggctgcggagttcctattgtggattcatattactcattgctgatgcccatcctcactttgactagggcattggctgctgagtcccatatggatgctgatctcgcaaaaccacttattaagtgggatttgctgaaatatgattttacggaagagagactttgtctcttcgaccgttattttaaatattgggaccagacataccatcccaattgtattaactgtttggatgataggtgtatccttcattgtgcaaactttaatgtgttattttctactgtgtttccacctacaagttttggaccactagtaagaaaaatatttgtagatggtgttccttttgttgtttcaactggataccattttcgtgagttaggagtcgtacataatcaggatgtaaacttacatagctcgcgtctcagtttcaaggaacttttagtgtatgctgctgatccagctatgcatgcagcttctggcaatttattgctagataaacgcactacatgcttttcagtagctgcactaacaaacaatgttgcttttcaaactgtcaaacccggtaattttaataaagacttttatgactttgctgtgtctaaaggtttctttaaggaaggaagttctgttgaactaaaacacttcttctttgctcaggatggcaacgctgctatcagtgattatgactattatcgttataatctgccaacaatgtgtgatatcagacaactcctattcgtagttgaagttgttgataaatactttgattgttacgatggtggctgtattaatgccaaccaagtaatcgttaacaatctggataaatcagctggtttcccatttaataaatggggtaaggctagactttattatgactcaatgagttatgaggatcaagatgcacttttcgcgtatactaagcgtaatgtcatccctactataactcaaatgaatcttaagtatgccattagtgcaaagaatagagctcgcaccgtagctggtgtctctatctgtagtactatgacaaatagacagtttcatcagaaattattgaagtcaatagccgccactagaggagctactgtggtaattggaacaagcaagttttacggtggctggcataatatgttaaaaactgtttacagtgatgtagaaactccacaccttatgggttgggattatccaaaatgtgacagagccatgcctaacatgcttaggataatggcctctcttgttcttgctcgcaaacataacacttgctgtaacttatcacaccgtttctacaggttagctaacgagtgtgcgcaagtattaagtgagatggtcatgtgtggcggctcactatatgttaaaccaggtggaacatcatccggtgatgctacaactgcttatgctaatagtgtctttaacatttgtcaagctgttacagccaatgtaaatgcacttctttcaactgatggtaataagatagctgacaagtatgtccgcaatctacaacacaggctctatgagtgtctctatagaaatagggatgttgatcatgaattcgtggatgagttttacgcttacctgcgtaaacatttctccatgatgattctttctgatgatgccgttgtgtgctataacagtaactatgcggctcaaggtttagtagctagcattaagaactttaaggcagttctttattatcaaaataatgtgttcatgtctgaggcaaaatgttggactgagactgaccttactaaaggacctcacgaattttgctcacagcatacaatgctagttaaacaaggagatgattacgtgtacctgccttacccagatccatcaagaatattaggcgcaggctgttttgtcgatgatattgtcaaaacagatggtacacttatgattgaaaggttcgtgtcactggctattgatgcttacccacttacaaaacatcctaatcaggagtatgctgatgtctttcacttgtatttacaatacattagaaagttacatgatgagcttactggccacatgttggacatgtattccgtaatgctaactaatgataacacctcacggtactgggaacctgagttttatgaggctatgtacacaccacatacagtcttgcaggctgtaggtgcttgtgtattgtgcaattcacagacttcacttcgttgcggtgcctgtattaggagaccattcctatgttgcaagtgctgctatgaccatgtcatttcaacatcacacaaattagtgttgtctgttaatccctatgtttgcaatgccccaggttgtgatgtcactgatgtgacacaactgtatctaggaggtatgagctattattgcaagtcacataagcctcccattagttttccattatgtgctaatggtcaggtttttggtttatacaaaaacacatgtgtaggcagtgacaatgtcactgacttcaatgcgatagcaacatgtgattggactaatgctggcgattacatacttgccaacacttgtactgagagactcaagcttttcgcagcagaaacgctcaaagccactgaggaaacatttaagctgtcatatggtattgccactgtacgcgaagtactctctgacagagaattgcatctttcatgggaggttggaaaacctagaccaccattgaacagaaactatgtctttactggttaccgtgtaactaaaaatagtaaagtacagattggagagtacacctttgaaaaaggtgactatggtgatgctgttgtgtacagaggtactacgacatacaagttgaatgttggtgattactttgtgttgacatctcacactgtaatgccacttagtgcacctactctagtgccacaagagcactatgtgagaattactggcttgtacccaacactcaacatctcagatgagttttctagcaatgttgcaaattatcaaaaggtcggcatgcaaaagtactctacactccaaggaccacctggtactggtaagagtcattttgccatcggacttgctctctattacccatctgctcgcatagtgtatacggcatgctctcatgcagctgttgatgccctatgtgaaaaggcattaaaatatttgcccatagataaatgtagtagaatcatacctgcgcgtgcgcgcgtagagtgttttgataaattcaaagtgaattcaacactagaacagtatgttttctgcactgtaaatgcattgccagaaacaactgctgacattgtagtctttgatgaaatctctatggctactaattatgacttgagtgttgtcaatgctagacttcgtgcaaaacactacgtctatattggcgatcctgctcaattaccagccccccgcacattgctgactaaaggcacactagaaccagaatattttaattcagtgtgcagacttatgaaaacaataggtccagacatgttccttggaacttgtcgccgttgtcctgctgaaattgttgacactgtgagtgctttagtttatgacaataagctaaaagcacacaaggataagtcagctcaatgcttcaaaatgttctacaaaggtgttattacacatgatgtttcatctgcaatcaacagacctcaaataggcgttgtaagagaatttcttacacgcaatcctgcttggagaaaagctgtttttatctcaccttataattcacagaacgctgtagcttcaaaaatcttaggattgcctacgcagactgttgattcatcacagggttctgaatatgactatgtcatattcacacaaactactgaaacagcacactcttgtaatgtcaaccgcttcaatgtggctatcacaagggcaaaaattggcattttgtgcataatgtctgatagagatctttatgacaaactgcaatttacaagtctagaaataccacgtcgcaatgtggctacattacaagcagaaaatgtaactggactttttaaggactgtagtaagatcattactggtcttcatcctacacaggcacctacacacctcagcgttgatataaagttcaagactgaaggattatgtgttgacataccaggcataccaaaggacatgacctaccgtagactcatctctatgatgggtttcaaaatgaattaccaagtcaatggttaccctaatatgtttatcacccgcgaagaagctattcgtcacgttcgtgcgtggattggctttgatgtagagggctgtcatgcaactagagatgctgtgggtactaacatacctctccagctaggattttctacaggtgttaacttagtagctgtaccgactggttatgttgacactgaaaataacacagaattcaccagagttaatgcaaaacctccaccaggtgaccagtttaaacatcttataccactcatgtataaaggcttgccctggaatgtagtgcgtattaagatagtacaaatgctcagtgatacactgaaaggattgtcagacagagtcgtgttcgtcctttgggcgcatggctttgagcttacatcaatgaagtactttgtcaagattggacctgaaagaacgtgttgtctgtgtgacaaacgtgcaacttgcttttctacttcatcagatacttatgcctgctggaatcattctgtgggttttgactatgtctataacccatttatgattgatgttcagcagtggggctttacgggtaaccttcagagtaaccatgaccaacattgccaggtacatggaaatgcacatgtggctagttgtgatgctatcatgactagatgtttagcagtccatgagtgctttgttaagcgcgttgattggtctgttgaataccctattataggagatgaactgagggttaattctgcttgcagaaaagtacaacacatggttgtgaagtctgcattgcttgctgataagtttccagttcttcatgacattggaaatccaaaggctatcaagtgtgtgcctcaggctgaagtagaatggaagttctacgatgctcagccatgtagtgacaaagcttacaaaatagaggaactcttctattcttatgctacacatcacgataaattcactgatggtgtttgtttgttttggaattgtaacgttgatcgttacccagccaatgcaattgtgtgtaggtttgacacaagagtcttgtcaaacttgaacttaccaggctgtgatggtggtagtttgtatgtgaataagcatgcattccacactccagctttcgataaaagtgcatttactaatttaaagcaattgcctttcttttactattctgatagtccttgtgagtctcatggcaaacaagtagtgtcggatattgattatgttccactcaaatctgctacgtgtattacacgatgcaatttaggtggtgctgtttgcagacaccatgcaaatgagtaccgacagtacttggatgcatataatatgatgatttctgctggatttagcctatggatttacaaacaatttgatacttataacctgtggaatacatttaccaggttacagagtttagaaaatgtggcttataatgttgttaataaaggacactttgatggacacgccggcgaagcacctgtttccatcattaataatgctgtttacacaaaggtagatggtattgatgtggagatctttgaaaataagacaacacttcctgttaatgttgcatttgagctttgggctaagcgtaacattaaaccagtgccagagattaagatactcaataatttgggtgttgatatcgctgctaatactgtaatctgggactacaaaagagaagccccagcacatgtatctacaataggtgtctgcacaatgactgacattgccaagaaacctactgagagtgcttgttcttcacttactgtcttgtttgatggtagagtggaaggacaggtagacctttttagaaacgcccgtaatggtgttttaataacagaaggttcagtcaaaggtctaacaccttcaaagggaccagcacaagctagcgtcaatggagtcacattaattggagaatcagtaaaaacacagtttaactactttaagaaagtagacggcattattcaacagttgcctgaaacctactttactcagagcagagacttagaggattttaagcccagatcacaaatggaaactgactttctcgagctcgctatggatgaattcatacagcgatataagctcgagggctatgccttcgaacacatcgtttatggagatttcagtcatggacaacttggcggtcttcatttaatgataggcttagccaagcgctcacaagattcaccacttaaattagaggattttatccctatggacagcacagtgaaaaattacttcataacagatgcgcaaacaggttcatcaaaatgtgtgtgttctgtgattgatcttttacttgatgactttgtcgagataataaagtcacaagatttgtcagtgatttcaaaagtggtcaaggttacaattgactatgctgaaatttcattcatgctttggtgtaaggatggacatgttgaaaccttctacccaaaactacaagcaagtcaagcgtggcaaccaggtgttgcgatgcctaacttgtacaagatgcaaagaatgcttcttgaaaagtgtgaccttcagaattatggtgaaaatgctgttataccaaaaggaataatgatgaatgtcgcaaagtatactcaactgtgtcaatacttaaatacacttactttagctgtaccctacaacatgagagttattcactttggtgctggctctgataaaggagttgcaccaggtacagctgtgctcagacaatggttgccaactggcacactacttgtcgattcagatcttaatgacttcgtctccgacgcagattctactttaattggagactgtgcaacagtacatacggctaataaatgggaccttattattagcgatatgtatgaccctaggaccaaacatgtgacaaaagagaatgactctaaagaagggtttttcacttatctgtgtggatttataaagcaaaaactagccctgggtggttctatagctgtaaagataacagagcattcttggaatgctgacctttacaagcttatgggccatttctcatggtggacagcttttgttacaaatgtaaatgcatcatcatcggaagcatttttaattggggctaactatcttggcaagccgaaggaacaaattgatggctataccatgcatgctaactacattttctggaggaacacaaatcctatccagttgtcttcctattcactctttgacatgagcaaatttcctcttaaattaagaggaactgctgtaatgtctcttaaggagaatcaaatcaatgatatgatttattctcttctggaaaaaggtaggcttatcattagagaaaacaacagagttgtggtttcaagtgatattcttgttaacaactaaacgaacatgtttattttcttattatttcttactctcactagtggtagtgaccttgaccggtgcaccacttttgatgatgttcaagctcctaattacactcaacatacttcatctatgaggggggtttactatcctgatgaaatttttagatcagacactctttatttaactcaggatttatttcttccattttattctaatgttacagggtttcatactattaatcatacgtttggcaaccctgtcataccttttaaggatggtatttattttgctgccacagagaaatcaaatgttgtccgtggttgggtttttggttctaccatgaacaacaagtcacagtcggtgattattattaacaattctactaatgttgttatacgagcatgtaactttgaattgtgtgacaaccctttctttgctgtttctaaacccatgggtacacagacacatactatgatattcgataatgcatttaattgcactttcgagtacatatctgatgccttttcgcttgatgtttcagaaaagtcaggtaattttaaacacttacgagagtttgtgtttaaaaataaagatgggtttctctatgtttataagggctatcaacctatagatgtagttcgtgatctaccttctggttttaacactttgaaacctatttttaagttgcctcttggtattaacattacaaattttagagccattcttacagccttttcacctgctcaagacatttggggcacgtcagctgcagcctattttgttggctatttaaagccaactacatttatgctcaagtatgatgaaaatggtacaatcacagatgctgttgattgttctcaaaatccacttgctgaactcaaatgctctgttaagagctttgagattgacaaaggaatttaccagacctctaatttcagggttgttccctcaggagatgttgtgagattccctaatattacaaacttgtgtccttttggagaggtttttaatgctactaaattcccttctgtctatgcatgggagagaaaaaaaatttctaattgtgttgctgattactctgtgctctacaactcaacatttttttcaacctttaagtgctatggcgtttctgccactaagttgaatgatctttgcttctccaatgtctatgcagattcttttgtagtcaagggagatgatgtaagacaaatagcgccaggacaaactggtgttattgctgattataattataaattgccagatgatttcatgggttgtgtccttgcttggaatactaggaacattgatgctacttcaactggtaattataattataaatataggtatcttagacatggcaagcttaggccctttgagagagacatatctaatgtgcctttctcccctgatggcaaaccttgcaccccacctgctcttaattgttattggccattaaatgattatggtttttacaccactactggcattggctaccaaccttacagagttgtagtactttcttttgaacttttaaatgcaccggccacggtttgtggaccaaaattatccactgaccttattaagaaccagtgtgtcaattttaattttaatggactcactggtactggtgtgttaactccttcttcaaagagatttcaaccatttcaacaatttggccgtgatgtttctgatttcactgattctgttcgagatcctaaaacatctgaaatattagacatttcaccttgctcttttgggggtgtaagtgtaattacacctggaacaaatgcttcatctgaagttgctgttctatatcaagatgttaactgcactgatgtttctacagcaattcatgcagatcaactcacaccagcttggcgcatatattctactggaaacaatgtattccagactcaagcaggctgtcttataggagctgagcatgtcgacacttcttatgagtgcgacattcctattggagctggcatttgtgctagttaccatacagtttctttattacgtagtactagccaaaaatctattgtggcttatactatgtctttaggtgctgatagttcaattgcttactctaataacaccattgctatacctactaacttttcaattagcattactacagaagtaatgcctgtttctatggctaaaacctccgtagattgtaatatgtacatctgcggagattctactgaatgtgctaatttgcttctccaatatggtagcttttgcacacaactaaatcgtgcactctcaggtattgctgctgaacaggatcgcaacacacgtgaagtgttcgctcaagtcaaacaaatgtacaaaaccccaactttgaaatattttggtggttttaatttttcacaaatattacctgaccctctaaagccaactaagaggtcttttattgaggacttgctctttaataaggtgacactcgctgatgctggcttcatgaagcaatatggcgaatgcctaggtgatattaatgctagagatctcatttgtgcgcagaagttcaatggacttacagtgttgccacctctgctcactgatgatatgattgctgcctacactgctgctctagttagtggtactgccactgctggatggacatttggtgctggcgctgctcttcaaataccttttgctatgcaaatggcatataggttcaatggcattggagttacccaaaatgttctctatgagaaccaaaaacaaatcgccaaccaatttaacaaggcgattagtcaaattcaagaatcacttacaacaacatcaactgcattgggcaagctgcaagacgttgttaaccagaatgctcaagcattaaacacacttgttaaacaacttagctctaattttggtgcaatttcaagtgtgctaaatgatatcctttcgcgacttgataaagtcgaggcggaggtacaaattgacaggttaattacaggcagacttcaaagccttcaaacctatgtaacacaacaactaatcagggctgctgaaatcagggcttctgctaatcttgctgctactaaaatgtctgagtgtgttcttggacaatcaaaaagagttgacttttgtggaaagggctaccaccttatgtccttcccacaagcagccccgcatggtgttgtcttcctacatgtcacgtatgtgccatcccaggagaggaacttcaccacagcgccagcaatttgtcatgaaggcaaagcatacttccctcgtgaaggtgtttttgtgtttaatggcacttcttggtttattacacagaggaacttcttttctccacaaataattactacagacaatacatttgtctcaggaaattgtgatgtcgttattggcatcattaacaacacagtttatgatcctctgcaacctgagcttgactcattcaaagaagagctggacaagtacttcaaaaatcatacatcaccagatgttgatcttggcgacatttcaggcattaacgcttctgtcgtcaacattcaaaaagaaattgaccgcctcaatgaggtcgctaaaaatttaaatgaatcactcattgaccttcaagaattgggaaaatatgagcaatatattaaatggccttggtatgtttggctcggcttcattgctggactaattgccatcgtcatggttacaatcttgctttgttgcatgactagttgttgcagttgcctcaagggtgcatgctcttgtggttcttgctgcaagtttgatgaggatgactctgagccagttctcaagggtgtcaaattacattacacataaacgaacttatggatttgtttatgagattttttactcttggatcaattactgcacagccagtaaaaattgacaatgcttctcctgcaagtactgttcatgctacagcaacgataccgctacaagcctcactccctttcggatggcttgttattggcgttgcatttcttgctgtttttcagagcgctaccaaaataattgcgctcaataaaagatggcagctagccctttataagggcttccagttcatttgcaatttactgctgctatttgttaccatctattcacatcttttgcttgtcgctgcaggtatggaggcgcaatttttgtacctctatgccttgatatattttctacaatgcatcaacgcatgtagaattattatgagatgttggctttgttggaagtgcaaatccaagaacccattactttatgatgccaactactttgtttgctggcacacacataactatgactactgtataccatataacagtgtcacagatacaattgtcgttactgaaggtgacggcatttcaacaccaaaactcaaagaagactaccaaattggtggttattctgaggataggcactcaggtgttaaagactatgtcgttgtacatggctatttcaccgaagtttactaccagcttgagtctacacaaattactacagacactggtattgaaaatgctacattcttcatctttaacaagcttgttaaagacccaccgaatgtgcaaatacacacaatcgacggctcttcaggagttgctaatccagcaatggatccaatttatgatgagccgacgacgactactagcgtgcctttgtaagcacaagaaagtgagtacgaacttatgtactcattcgtttcggaagaaacaggtacgttaatagttaatagcgtacttctttttcttgctttcgtggtattcttgctagtcacactagccatccttactgcgcttcgattgtgtgcgtactgctgcaatattgttaacgtgagtttagtaaaaccaacggtttacgtctactcgcgtgttaaaaatctgaactcttctgaaggagttcctgatcttctggtctaaacgaactaactattattattattctgtttggaactttaacattgcttatcatggcagacaacggtactattaccgttgaggagcttaaacaactcctggaacaatggaacctagtaataggtttcctattcctagcctggattatgttactacaatttgcctattctaatcggaacaggtttttgtacataataaagcttgttttcctctggctcttgtggccagtaacacttgcttgttttgtgcttgctgctgtctacagaattaattgggtgactggcgggattgcgattgcaatggcttgtattgtaggcttgatgtggcttagctacttcgttgcttccttcaggctgtttgctcgtacccgctcaatgtggtcattcaacccagaaacaaacattcttctcaatgtgcctctccgggggacaattgtgaccagaccgctcatggaaagtgaacttgtcattggtgctgtgatcattcgtggtcacttgcgaatggccggacactccctagggcgctgtgacattaaggacctgccaaaagagatcactgtggctacatcacgaacgctttcttattacaaattaggagcgtcgcagcgtgtaggcactgattcaggttttgctgcatacaaccgctaccgtattggaaactataaattaaatacagaccacgccggtagcaacgacaatattgctttgctagtacagtaagtgacaacagatgtttcatcttgttgacttccaggttacaatagcagagatattgattatcattatgaggactttcaggattgctatttggaatcttgacgttataataagttcaatagtgagacaattatttaagcctctaactaagaagaattattcggagttagatgatgaagaacctatggagttagattatccataaaacgaacatgaaaattattctcttcctgacattgattgtatttacatcttgcgagctatatcactatcaggagtgtgttagaggtacgactgtactactaaaagaaccttgcccatcaggaacatacgagggcaattcaccatttcaccctcttgctgacaataaatttgcactaacttgcactagcacacactttgcttttgcttgtgctgacggtactcgacatacctatcagctgcgtgcaagatcagtttcaccaaaacttttcatcagacaagaggaggttcaacaagagctctactcgccactttttctcattgttgctgctctagtatttttaatactttgcttcaccattaagagaaagacagaatgaatgagctcactttaattgacttctatttgtgctttttagcctttctgctattccttgttttaataatgcttattatattttggttttcactcgaaatccaggatctagaagaaccttgtaccaaagtctaaacgaacatgaaacttctcattgttttgacttgtatttctctatgcagttgcatatgcactgtagtacagcgctgtgcatctaataaacctcatgtgcttgaagatccttgtaaggtacaacactaggggtaatacttatagcactgcttggctttgtgctctaggaaaggttttaccttttcatagatggcacactatggttcaaacatgcacacctaatgttactatcaactgtcaagatccagctggtggtgcgcttatagctaggtgttggtaccttcatgaaggtcaccaaactgctgcatttagagacgtacttgttgttttaaataaacgaacaaattaaaatgtctgataatggaccccaatcaaaccaacgtagtgccccccgcattacatttggtggacccacagattcaactgacaataaccagaatggaggacgcaatggggcaaggccaaaacagcgccgaccccaaggtttacccaataatactgcgtcttggttcacagctctcactcagcatggcaaggaggaacttagattccctcgaggccagggcgttccaatcaacaccaatagtggtccagatgaccaaattggctactaccgaagagctacccgacgagttcgtggtggtgacggcaaaatgaaagagctcagccccagatggtacttctattacctaggaactggcccagaagcttcacttccctacggcgctaacaaagaaggcatcgtatgggttgcaactgagggagccttgaatacacccaaagaccacattggcacccgcaatcctaataacaatgctgccaccgtgctacaacttcctcaaggaacaacattgccaaaaggcttctacgcagagggaagcagaggcggcagtcaagcctcttctcgctcctcatcacgtagtcgcggtaattcaagaaattcaactcctggcagcagtaggggaaattctcctgctcgaatggctagcggaggtggtgaaactgccctcgcgctattgctgctagacagattgaaccagcttgagagcaaagtttctggtaaaggccaacaacaacaaggccaaactgtcactaagaaatctgctgctgaggcatctaaaaagcctcgccaaaaacgtactgccacaaaacagtacaacgtcactcaagcatttgggagacgtggtccagaacaaacccaaggaaatttcggggaccaagacctaatcagacaaggaactgattacaaacattggccgcaaattgcacaatttgctccaagtgcctctgcattctttggaatgtcacgcattggcatggaagtcacaccttcgggaacatggctgacttatcatggagccattaaattggatgacaaagatccacaattcaaagacaacgtcatactgctgaacaagcacattgacgcatacaaaacattcccaccaacagagcctaaaaaggacaaaaagaaaaagactgatgaagctcagcctttgccgcagagacaaaagaagcagcccactgtgactcttcttcctgcggctgacatggatgatttctccagacaacttcaaaattccatgagtggagcttctgctgattcaactcaggcataaacactcatgatgaccacacaaggcagatgggctatgtaaacgttttcgcaattccgtttacgatacatagtctactcttgtgcagaatgaattctcgtaactaaacagcacaagtaggtttagttaactttaatctcacatagcaatctttaatcaatgtgtaacattagggaggacttgaaagagccaccacattttcatcgaggccacgcggagtacgatcgagggtacagtgaataatgctagggagagctgcctatatggaagagccctaatgtgtaaaattaattttagtagtgctatccccatgtgattttaatagcttcttaggagaatgac

SEQ ID NO: 29758 - DNA, 29705 bp, SARS Coronavirus
tacccaggaaaagccaaccaacctcgatctcttgtagatctgttctctaaacgaactttaaaatctgtgtagctgtcgctcggctgcatgcctagtgcacctacgcagtataaacaataataaattttactgtcgttgacaagaaacgagtaactcgtccctcttctgcagactgcttacggtttcgtccgtgttgcagtcgatcatcagcatacctaggtttcgtccgggtgtgaccgaaaggtaagatggagagccttgttcttggtgtcaacgagaaaacacacgtccaactcagtttgcctgtccttcaggttagagacgtgctagtgcgtggcttcggggactctgtggaagaggccctatcggaggcacgtgaacacctcaaaaatggcacttgtggtctagtagagctggaaaaaggcgtactgccccagcttgaacagccctatgtgttcattaaacgttctgatgccttaagcaccaatcacggccacaaggtcgttgagctggttgcagaaatggacggcattcagtacggtcgtagcggtataacactgggagtactcgtgccacatgtgggcgaaaccccaattgcataccgcaatgttcttcttcgtaagaacggtaataagggagccggtggtcatagctatggcatcgatctaaagtcttatgacttaggtgacgagcttggcactgatcccattgaagattatgaacaaaactggaacactaagcatggcagtggtgcactccgtgaactcactcgtgagctcaatggaggtgcagtcactcgctatgtcgacaacaatttctgtggcccagatgggtaccctcttgattgcatcaaagattttctcgcacgcgcgggcaagtcaatgtgcactctttccgaacaacttgattacatcgagtcgaagagaggtgtctactgctgccgtgaccatgagcatgaaattgcctggttcactgagcgctctgataagagctacgagcaccagacacccttcgaaattaagagtgccaagaaatttgacactttcaaaggggaatgcccaaagtttgtgtttcctcttaactcaaaagtcaaagtcattcaaccacgtgttgaaaagaaaaagactgagggtttcatggggcgtatacgctctgtgtaccctgttgcatctccacaggagtgtaacaatatgcacttgtctaccttgatgaaatgtaatcattgcgatgaagtttcatggcagacgtgcgactttctgaaagccacttgtgaacattgtggcactgaaaatttagttattgaaggacctactacatgtgggtacctacctactaatgctgtagtgaaaatgccatgtcctgcctgtcaagacccagagattggacctgagcatagtgttgcagattatcacaaccactcaaacattgaaactcgactccgcaagggaggtaggactaggtgttttggaggctgtgtgtttgcctatgttggctgctataataagcgtgcctactgggttcctcgtgctagtgctgatattggctcaggccatactggcattactggtgacaatgtggagaccttgaatgaggatctccttgagatactgagtcgtgaacgtgttaacattaacattgttggcgattttcatttgaatgaagaggttgccatcattttggcatctttctctgcttctacaagtgcctttattgacactataaagagtcttgattacaagtctttcaaaaccattgttgagtcctgcggtaactataaagttaccaagggaaagcccgtaaaaggtgcttggaacattggacaacagagatcagttttaacaccactgtgtggttttccctcacaggctgctggtgttatcagatcaatttttgcgcgcacacttgatgcagcaaaccactcaattcctgatttgcaaagagcagctgtcaccatacttgatggtatttctgaacagtcattacgtcttgtcgacgccatggtttatacttcagacctgctcaccaacagtgtcattattatggcatatgtaactggtggtcttgtacaacagacttctcagtggttgtctaatcttttgggcactactgttgaaaaactcaggcctatctttgaatggattgaggcgaaacttagtgcaggagttgaatttctcaaggatgcttgggagattctcaaatttctcattacaggtgtttttgacatcgtcaagggtcaaatacaggttgcttcagataacatcaaggattgtgtaaaatgcttcattgatgttgttaacaaggcactcgaaatgtgcattgatcaagtcactatcgctggcgcaaagttgcgatcactcaacttaggtgaagtcttcatcgctcaaagcaagggactttaccgtcagtgtatacgtggcaaggagcagctgcaactactcatgcctcttaaggcaccaaaagaagtaacctttcttgaaggtgattcacatgacacagtacttacctctgaggaggttgttctcaagaacggtgaactcgaagcactcgagacgcccgttgatagcttcacaaatggagctatcgttggcacaccagtctgtgtaaatggcctcatgctcttagagattaaggacaaagaacaatactgcgcattgtctcctggtttactggctacaaacaatgtctttcgcttaaaagggggtgcaccaattaaaggtgtaacctttggagaagatactgtttgggaagttcaaggttacaagaatgtgagaatcacatttgagcttgatgaacgtgttgacaaagtgcttaatgaaaagtgctctgtctacactgttgaatccggtaccgaagttactgagtttgcatgtgttgtagcagaggctgttgtgaagactttacaaccagtttctgatctccttaccaacatgggtattgatcttgatgagtggagtgtagctacattctacttatttgatgatgctggtgaagaaaacttttcatcacgtatgtattgttccttttaccctccagatgaggaagaagaggacgatgcagagtgtgaggaagaagaaattgatgaaacctgtgaacatgagtacggtacagaggatgattatcaaggtctccctctggaatttggtgcctcagctgaaacagttcgagttgaggaagaagaagaggaagactggctggatgatactactgagcaatcagagattgagccagaaccagaacctacacctgaagaaccagttaatcagtttactggttatttaaaacttactgacaatgttgccattaaatgtgttgacatcgttaaggaggcacaaagtgctaatcctatggtgattgtaaatgctgctaacatacacctgaaacatggtggtggtgtagcaggtgcactcaacaaggcaaccaatggtgccatgcaaaaggagagtgatgattacattaagctaaatggccctcttacagtaggagggtcttgtttgctttctggacataatcttgctaagaagtgtctgcatgttgttggacctaacctaaatgcaggtgaggacatccagcttcttaaggcagcatatgaaaatttcaattcacaggacatcttacttgcaccattgttgtcagcaggcatatttggtgctaaaccacttcagtctttacaagtgtgcgtgcagacggttcgtacacaggtttatattgcagtcaatgacaaagctctttatgagcaggttgtcatggattatcttgataacctgaagcctagagtggaagcacctaaacaagaggagccaccaaacacagaagattccaaaactgaggagaaatctgtcgtacagaagcctgtcgatgtgaagccaaaaattaaggcctgcattgatgaggttaccacaacactggaagaaactaagtttcttaccaataagttactcttgtttgctgatatcaatggtaagctttaccatgattctcagaacatgcttagaggtgaagatatgtctttccttgagaaggatgcaccttacatggtaggtgatgttatcactagtggtgatatcacttgtgttgtaataccctccaaaaaggctggtggcactactgagatgctctcaagagctttgaagaaagtgccagttgatgagtatataaccacgtaccctggacaaggatgtgctggttatacacttgaggaagctaagactgctcttaagaaatgcaaatctgcattttatgtactaccttcagaagcacctaatgctaaggaagagattctaggaactgtatcctggaatttgagagaaatgcttgctcatgctgaagagacaagaaaattaatgcctatatgcatggatgttagagccataatggcaaccatccaacgtaagtataaaggaattaaaattcaagagggcatcgttgactatggtgtccgattcttcttttatactagtaaagagcctgtagcttctattattacgaagctgaactctctaaatgagccgcttgtcacaatgccaattggttatgtgacacatggttttaatcttgaagaggctgcgcgctgtatgcgttctcttaaagctcctgccgtagtgtcagtatcatcaccagatgctgttactacatataatggatacctcacttcgtcatcaaagacatctgaggagcactttgtagaaacagtttctttggctggctcttacagagattggtcctattcaggacagcgtacagagttaggtgttgaatttcttaagcgtggtgacaaaattgtgtaccacactctggagagccccgtcgagtttcatcttgacggtgaggttctttcacttgacaaactaaagagtctcttatccctgcgggaggttaagactataaaagtgttcacaactgtggacaacactaatctccacacacagcttgtggatatgtctatgacatatggacagcagtttggtccaacatacttggatggtgctgatgttacaaaaattaaacctcatgtaaatcatgagggtaagactttctttgtactacctagtgatgacacactacgtagtgaagctttcgagtactaccatactcttgatgagagttttcttggtaggtacatgtctgctttaaaccacacaaagaaatggaaatttcctcaagttggtggtttaacttcaattaaatgggctgataacaattgttatttgtctagtgttttattagcacttcaacagcttgaagtcaaattcaatgcaccagcacttcaagaggcttattatagagcccgtgctggtgatgctgctaacttttgtgcactcatactcgcttacagtaataaaactgttggcgagcttggtgatgtcagagaaactatgacccatcttctacagcatgctaatttggaatctgcaaagcgagttcttaatgtggtgtgtaaacattgtggtcagaaaactactaccttaacgggtgtagaagctgtgatgtatatgggtactctatcttatgataatcttaagacaggtgtttccattccatgtgtgtgtggtcgtgatgctacacaatatctagtacaacaagagtcttcttttgttatgatgtctgcaccacctgctgagtataaattacagcaaggtacattcttatgtgcgaatgagtacactggtaactatcagtgtggtcattacactcatataactgctaaggagaccctctatcgtattgacggagctcaccttacaaagatgtcagagtacaaaggaccagtgactgatgttttctacaaggaaacatcttacactacaaccatcaagcctgtgtcgtataaactcgatggagttacttacacagagattgaaccaaaattggatgggtattataaaaaggataatgcttactatacagagcagcctatagaccttgtaccaactcaaccattaccaaatgcgagttttgataatttcaaactcacatgttctaacacaaaatttgctgatgatttaaatcaaatgacaggcttcacaaagccagcttcacgagagctatctgtcacattcttcccagacttgaatggcgatgtagtggctattgactatagacactattcagcgagtttcaagaaaggtgctaaattactgcataagccaattgtttggcacattaaccaggctacaaccaagacaacgttcaaaccaaacacttggtgtttacgttgtctttggagtacaaagccagtagatacttcaaattcatttgaagttctggcagtagaagacacacaaggaatggacaatcttgcttgtgaaagtcaacaacccacctctgaagaagtagtggaaaatcctaccatacagaaggaagtcatagagtgtgacgtgaaaactaccgaagttgtaggcaatgtcatacttaaaccatcagatgaaggtgttaaagtaacacaagagttaggtcatgaggatcttatggctgcttatgtggaaaacacaagcattaccattaagaaacctaatgagctttcactagccttaggtttaaaaacaattgccactcatggtattgctgcaattaatagtgttccttggagtaaaattttggcttatgtcaaaccattcttaggacaagcagcaattacaacatcaaattgcgctaagagattagcacaacgtgtgtttaacaattatatgccttatgtgtttacattattgttccaattgtgtacttttactaaaagtaccaattctagaattagagcttcactacctacaactattgctaaaaatagtgttaagagtgttgctaaattatgtttggatgccggcattaattatgtgaagtcacccaaattttctaaattgttcacaatcgctatgtggctattgttgttaagtatttgcttaggttctctaatctgtgtaactgctgcttttggtgtactcttatctaattttggtgctccttcttattgtaatggcgttagagaattgtatcttaattcgtctaacgttactactatggatttctgtgaaggttcttttccttgcagcatttgtttaagtggattagactcccttgattcttatccagctcttgaaaccattcaggtgacgatttcatcgtacaagctagacttgacaattttaggtctggccgctgagtgggttttggcatatatgttgttcacaaaattcttttatttattaggtctttcagctataatgcaggtgttctttggctattttgctagtcatttcatcagcaattcttggctcatgtggtttatcattagtattgtacaaatggcacccgtttctgcaatggttaggatgtacatcttctttgcttctttctactacatatggaagagctatgttcatatcatggatggttgcacctcttcgacttgcatgatgtgctataagcgcaatcgtgccacacgcgttgagtgtacaactattgttaatggcatgaagagatctttctatgtctatgcaaatggaggccgtggcttctgcaagactcacaattggaattgtctcaattgtgacacattttgcactggtagtacattcattagtgatgaagttgctcgtgatttgtcactccagtttaaaagaccaatcaaccctactgaccagtcatcgtatattgttgatagtgttgctgtgaaaaatggcgcgcttcacctctactttgacaaggctggtcaaaagacctatgagagacatccgctctcccattttgtcaatttagacaatttgagagctaacaacactaaaggttcactgcctattaatgtcatagtttttgatggcaagtccaaatgcgacgagtctgcttctaagtctgcttctgtgtactacagtcagctgatgtgccaacctattctgttgcttgaccaagctcttgtatcagacgttggagatagtactgaagtttccgttaagatgtttgatgcttatgtcgacaccttttcagcaacttttagtgttcctatggaaaaacttaaggcacttgttgctacagctcacagcgagttagcaaagggtgtagctttagatggtgtcctttctacattcgtgtcagctgcccgacaaggtgttgttgataccgatgttgacacaaaggatgttattgaatgtctcaaactttcacatcactctgacttagaagtgacaggtgacagttgtaacaatttcatgctcacctataataaggttgaaaacatgacgcccagagatcttggcgcatgtattgactgtaatgcaaggcatatcaatgcccaagtagcaaaaagtcacaatgtttcactcatctggaatgtaaaagactacatgtctttatctgaacagctgcgtaaacaaattcgtagtgctgccaagaagaacaacataccttttagactaacttgtgctacaactagacaggttgtcaatgtcataactactaaaatctcactcaagggtggtaagattgttagtacttgttttaaacttatgcttaaggccacattattgtgcgttcttgctgcattggtttgttatatcgttatgccagtacatacattgtcaatccatgatggttacacaaatgaaatcattggttacaaagccattcaggatggtgtcactcgtgacatcatttctactgatgattgttttgcaaataaacatgctggttttgacgcatggtttagccagcgtggtggttcatacaaaaatgacaaaagctgccctgtagtagctgctatcattacaagagagattggtttcatagtgcctggcttaccgggtactgtgctgagagcaatcaatggtgacttcttgcattttctacctcgtgtttttagtgctgttggcaacatttgctacacaccttccaaactcattgagtatagtgattttgctacctctgcttgcgttcttgctgctgagtgtacaatttttaaggatgctatgggcaaacctgtgccatattgttatgacactaatttgctagagggttctatttcttatagtgagcttcgtccagacactcgttatgtgcttatggatggttccatcatacagtttcctaacacttacctggagggttctgttagagtagtaacaacttttgatgctgagtactgtagacatggtacatgcgaaaggtcagaagtaggtatttgcctatctaccagtggtagatgggttcttaataatgagcattacagagctctatcaggagttttctgtggtgttgatgcgatgaatctcatagctaacatctttactcctcttgtgcaacctgtgggtgctttagatgtgtctgcttcagtagtggctggtggtattattgccatattggtgacttgtgctgcctactactttatgaaattcagacgtgtttttggtgagtacaaccatgttgttgctgctaatgcacttttgtttttgatgtctttcactatactctgtctggtaccagcttacagctttctgccgggagtctactcagtcttttacttgtacttgacattctatttcaccaatgatgtttcattcttggctcaccttcaatggtttgccatgttttctcctattgtgcctttttggataacagcaatctatgtattctgtatttctctgaagcactgccattggttctttaacaactatcttaggaaaagagtcatgtttaatggagttacatttagtaccttcgaggaggctgctttgtgtacctttttgctcaacaaggaaatgtacctaaaattgcgtagcgagacactgttgccacttacacagtataacaggtatcttgctctatataacaagtacaagtatttcagtggagccttagatactaccagctatcgtgaagcagcttgctgccacttagcaaaggctctaaatgactttagcaactcaggtgctgatgttctctaccaaccaccacagacatcaatcacttctgctgttctgcagagtggttttaggaaaatggcattcccgtcaggcaaagttgaagggtgcatggtacaagtaacctgtggaactacaactcttaatggattgtggttggatgacacagtatactgtccaagacatgtcatttgcacagcagaagacatgcttaatcctaactatgaagatctgctcattcgcaaatccaaccatagctttcttgttcaggctggcaatgttcaacttcgtgttattggccattctatgcaaaattgtctgcttaggcttaaagttgatacttctaaccctaagacacccaagtataaatttgtccgtatccaacctggtcaaacattttcagttctagcatgctacaatggttcaccatctggtgtttatcagtgtgccatgagacctaatcataccattaaaggttctttccttaatggatcatgtggtagtgttggttttaacattgattatgattgcgtgtctttctgctatatgcatcatatggagcttccaacaggagtacacgctggtactgacttagaaggtaaattctatggtccatttgttgacagacaaactgcacaggctgcaggtacagacacaaccataacattaaatgttttggcatggctgtatgctgctgttatcaatggtgataggtggtttcttaatagattcaccactactttgaatgactttaaccttgtggcaatgaagtacaactatgaacctttgacacaagatcatgttgacatattgggacctctttctgctcaaacaggaattgccgtcttagatatgtgtgctgctttgaaagagctgctgcagaatggtatgaatggtcgtactatccttggtagcactattttagaagatgagtttacaccatttgatgttgttagacaatgctctggtgttaccttccaaggtaagttcaagaaaattgttaagggcactcatcattggatgcttttaactttcttgacatcactattgattcttgttcaaagtacacagtggtcactgtttttctttgtttacgagaatgctttcttgccatttactcttggtattatggcaattgctgcatgtgctatgctgcttgttaagcataagcacgcattcttgtgcttgtttctgttaccttctcttgcaacagttgcttactttaatatggtctacatgcctgctagctgggtgatgcgtatcatgacatggcttgaattggctgacactagcttgtctggttataggcttaaggattgtgttatgtatgcttcagctttagttttgcttattctcatgacagctcgcactgtttatgatgatgctgctagacgtgtttggacactgatgaatgtcattacacttgtttacaaagtctactatggtaatgctttagatcaagctatttccatgtgggccttagttatttctgtaacctctaactattctggtgtcgttacgactatcatgtttttagctagagctatagtgtttgtgtgtgttgagtattacccattgttatttattactggcaacaccttacagtgtatcatgcttgtttattgtttcttaggctattgttgctgctgctactttggccttttctgtttactcaaccgttacttcaggcttactcttggtgtttatgactacttggtctctacacaagaatttaggtatatgaactcccaggggcttttgcctcctaagagtagtattgatgctttcaagcttaacattaagttgttgggtattggaggtaaaccatgtatcaaggttgctactgtacagtctaaaatgtctgacgtaaagtgcacatctgtggtactgctctcggttcttcaacaacttagagtagagtcatcttctaaattgtgggcacaatgtgtacaactccacaatgatattcttcttgcaaaagacacaactgaagctttcgagaagatggtttctcttttgtctgttttgctatccatgcagggtgctgtagacattaataggttgtgcgaggaaatgctcgataaccgtgctactcttcaggctattgcttcagaatttagttctttaccatcatatgccgcttatgccactgcccaggaggcctatgagcaggctgtagctaatggtgattctgaagtcgttctcaaaaagttaaagaaatctttgaatgtggctaaatctgagtttgaccgtgatgctgccatgcaacgcaagttggaaaagatggcagatcaggctatgacccaaatgtacaaacaggcaagatctgaggacaagagggcaaaagtaactagtgctatgcaaacaatgctcttcactatgcttaggaagcttgataatgatgcacttaacaacattatcaacaatgcgcgtgatggttgtgttccactcaacatcataccattgactacagcagccaaactcatggttgttgtccctgattatggtacctacaagaacacttgtgatggtaacacctttacatatgcatctgcactctgggaaatccagcaagttgttgatgcggatagcaagattgttcaacttagtgaaattaacatggacaattcaccaaatttggcttggcctcttattgttacagctctaagagccaactcagctgttaaactacagaataatgaactgagtccagtagcactacgacagatgtcctgtgcggctggtaccacacaaacagcttgtactgatgacaatgcacttgcctactataacaattcgaagggaggtaggtttgtgctggcattactatcagaccaccaagatctcaaatgggctagattccctaagagtgatggtacaggtacaatttacacagaactggaaccaccttgtaggtttgttacagacacaccaaaagggcctaaagtgaaatacttgtacttcatcaaaggcttaaacaacctaaatagaggtatggtgctgggcagtttagctgctacagtacgtcttcaggctggaaatgctacagaagtacctgccaattcaactgtgctttccttctgtgcttttgcagtagaccctgctaaagcatataaggattacctagcaagtggaggacaaccaatcaccaactgtgtgaagatgttgtgtacacacactggtacaggacaggcaattactgtaacaccagaagctaacatggaccaagagtcctttggtggtgcttcatgttgtctgtattgtagatgccacattgaccatccaaatcctaaaggattctgtgacttgaaaggtaagtacgtccaaatacctaccacttgtgctaatgacccagtgggttttacacttagaaacacagtctgtaccgtctgcggaatgtggaaaggttatggctgtagttgtgaccaactccgcgaacccttgatgcagtctgcggatgcatcaacgtttttaaacgggtttgcggtgtaagtgcagcccgtcttacaccgtgcggcacaggcactagtactgatgtcgtctacagggcttttgatatttacaacgaaaaagttgctggttttgcaaagttcctaaaaactaattgctgtcgcttccaggagaaggatgaggaaggcaatttattagactcttactttgtagttaagaggcatactatgtctaactaccaacatgaagagactatttataacttggttaaagattgtccagcggttgctgtccatgactttttcaagtttagagtagatggtgacatggtaccacatatatcacgtcagcgtctaactaaatacacaatggctgatttagtctatgctctacgtcattttgatgagggtaattgtgatacattaaaagaaatactcgtcacatacaattgctgtgatgatgattatttcaataagaaggattggtatgacttcgtagagaatcctgacatcttacgcgtatatgctaacttaggtgagcgtgtacgccaatcattattaaagactgtacaattctgcgatgctatgcgtgatgcaggcattgtaggcgtactgacattagataatcaggatcttaatgggaactggtacgatttcggtgatttcgtacaagtagcaccaggctgcggagttcctattgtggattcatattactcattgctgatgcccatcctcactttgactagggcattggctgctgagtcccatatggatgctgatctcgcaaaaccacttattaagtgggatttgctgaaatatgattttacggaagagagactttgtctcttcgaccgttattttaaatattgggaccagacataccatcccaattgtattaactgtttggatgataggtgtatccttcattgtgcaaactttaatgtgttattttctactgtgtttccacctacaagttttggaccactagtaagaaaaatatttgtagatggtgttccttttgttgtttcaactggataccattttcgtgagttaggagtcgtacataatcaggatgtaaacttacatagctcgcgtctcagtttcaaggaacttttagtgtatgctgctgatccagctatgcatgcagcttctggcaatttattgctagataaacgcactacatgcttttcagtagctgcactaacaaacaatgttgcttttcaaactgtcaaacccggtaattttaataaagacttttatgactttgctgtgtctaaaggtttctttaaggaaggaagttctgttgaactaaaacacttcttctttgctcaggatggcaacgctgctatcagtgattatgactattatcgttataatctgccaacaatgtgtgatatcagacaactcctattcgtagttgaagttgttgataaatactttgattgttacgatggtggctgtattaatgccaaccaagtaatcgttaacaatctggataaatcagctggtttcccatttaataaatggggtaaggctagactttattatgactcaatgagttatgaggatcaagatgcacttttcgcgtatactaagcgtaatgtcatccctactataactcaaatgaatcttaagtatgccattagtgcaaagaatagagctcgcaccgtagctggtgtctctatctgtagtactatgacaaatagacagtttcatcagaaattattgaagtcaatagccgccactagaggagctactgtggtaattggaacaagcaagttttacggtggctggcataatatgttaaaaactgtttacagtgatgtagaaactccacaccttatgggttgggattatccaaaatgtgacagagccatgcctaacatgcttaggataatggcctctcttgttcttgctcgcaaacataacacttgctgtaacttatcacaccgtttctacaggttagctaacgagtgtgcgcaagtattaagtgagatggtcatgtgtggcggctcactatatgttaaaccaggtggaacatcatccggtgatgctacaactgcttatgctaatagtgtctttaacatttgtcaagctgttacagccaatgtaaatgcacttctttcaactgatggtaataagatagctgacaagtatgtccgcaatctacaacacaggctctatgagtgtctctatagaaatagggatgttgatcatgaattcgtggatgagttttacgcttacctgcgtaaacatttctccatgatgattctttctgatgatgccgttgtgtgctataacagtaactatgcggctcaaggtttagtagctagcattaagaactttaaggcagttctttattatcaaaataatgtgttcatgtctgaggcaaaatgttggactgagactgaccttactaaaggacctcacgaattttgctcacagcatacaatgctagttaaacaaggagatgattacgtgtacctgccttacccagatccatcaagaatattaggcgcaggctgttttgtcgatgatattgtcaaaacagatggtacacttatgattgaaaggttcgtgtcactggctattgatgcttacccacttacaaaacatcctaatcaggagtatgctgatgtctttcacttgtatttacaatacattagaaagttacatgatgagcttactggccacatgttggacatgtattccgtaatgctaactaatgataacacctcacggtactgggaacctgagttttatgaggctatgtacacaccacatacagtcttgcaggctgtaggtgcttgtgtattgtgcaattcacagacttcacttcgttgcggtgcctgtattaggagaccattcctatgttgcaagtgctgctatgaccatgtcatttcaacatcacacaaattagtgttgtctgttaatccctatgtttgcaatgccccaggttgtgatgtcactgatgtgacacaactgtatctaggaggtatgagctattattgcaagtcacataagcctcccattagttttccattatgtgctaatggtcaggtttttggtttatacaaaaacacatgtgtaggcagtgacaatgtcactgacttcaatgcgatagcaacatgtgattggactaatgctggcgattacatacttgccaacacttgtactgagagactcaagcttttcgcagcagaaacgctcaaagccactgaggaaacatttaagctgtcatatggtattgccactgtacgcgaagtactctctgacagagaattgcatctttcatgggaggttggaaaacctagaccaccattgaacagaaactatgtctttactggttaccgtgtaactaaaaatagtaaagtacagattggagagtacacctttgaaaaaggtgactatggtgatgctgttgtgtacagaggtactacgacatacaagttgaatgttggtgattactttgtgttgacatctcacactgtaatgccacttagtgcacctactctagtgccacaagagcactatgtgagaattactggcttgtacccaacactcaacatctcagatgagttttctagcaatgttgcaaattatcaaaaggtcggcatgcaaaagtactctacactccaaggaccacctggtactggtaagagtcattttgccatcggacttgctctctattacccatctgctcgcatagtgtatacggcatgctctcatgcagctgttgatgccctatgtgaaaaggcattaaaatatttgcccatagataaatgtagtagaatcatacctgcgcgtgcgcgcgtagagtgttttgataaattcaaagtgaattcaacactagaacagtatgttttctgcactgtaaatgcattgccagaaacaactgctgacattgtagtctttgatgaaatctctatggctactaattatgacttgagtgttgtcaatgctagacttcgtgcaaaacactacgtctatattggcgatcctgctcaattaccagccccccgcacattgctgactaaaggcacactagaaccagaatattttaattcagtgtgcagacttatgaaaacaataggtccagacatgttccttggaacttgtcgccgttgtcctgctgaaattgttgacactgtgagtgctttagtttatgacaataagctaaaagcacacaaggataagtcagctcaatgcttcaaaatgttctacaaaggtgttattacacatgatgtttcatctgcaatcaacagacctcaaataggcgttgtaagagaatttcttacacgcaatcctgcttggagaaaagctgtttttatctcaccttataattcacagaacgctgtagcttcaaaaatcttaggattgcctacgcagactgttgattcatcacagggttctgaatatgactatgtcatattcacacaaactactgaaacagcacactcttgtaatgtcaaccgcttcaatgtggctatcacaagggcaaaaattggcattttgtgcataatgtctgatagagatctttatgacaaactgcaatttacaagtctagaaataccacgtcgcaatgtggctacattacaagcagaaaatgtaactggactttttaaggactgtagtaagatcattactggtcttcatcctacacaggcacctacacacctcagcgttgatataaagttcaagactgaaggattatgtgttgacataccaggcataccaaaggacatgacctaccgtagactcatctctatgatgggtttcaaaatgaattaccaagtcaatggttaccctaatatgtttatcacccgcgaagaagctattcgtcacgttcgtgcgtggattggctttgatgtagagggctgtcatgcaactagagatgctgtgggtactaacctacctctccagctaggattttctacaggtgttaacttagtagctgtaccgactggttatgttgacactgaaaataacacagaattcaccagagttaatgcaaaacctccaccaggtgaccagtttaaacatcttataccactcatgtataaaggcttgccctggaatgtagtgcgtattaagatagtacaaatgctcagtgatacactgaaaggattgtcagacagagtcgtgttcgtcctttgggcgcatggctttgagcttacatcaatgaagtactttgtcaagattggacctgaaagaacgtgttgtctgtgtgacaaacgtgcaacttgcttttctacttcatcagatacttatgcctgctggaatcattctgtgggttttgactatgtctataacccatttatgattgatgttcagcagtggggctttacgggtaaccttcagagtaaccatgaccaacattgccaggtacatggaaatgcacatgtggctagttgtgatgctatcatgactagatgtttagcagtccatgagtgctttgttaagcgcgttgattggtctgttgaataccctattataggagatgaactgagggttaattctgcttgcagaaaagtacaacacatggttgtgaagtctgcattgcttgctgataagtttccagttcttcatgacattggaaatccaaaggctatcaagtgtgtgcctcaggctgaagtagaatggaagttctacgatgctcagccatgtagtgacaaagcttacaaaatagaggaactcttctattcttatgctatacatcacgataaattcactgatggtgtttgtttgttttggaattgtaacgttgatcgttacccagccaatgcaattgtgtgtaggtttgacacaagagtcttgtcaaacttgaacttaccaggctgtgatggtggtagtttgtatgtgaataagcatgcattccacactccagctttcgataaaagtgcatttactaatttaaagcaattgcctttcttttactattctgatagtccttgtgagtctcatggcaaacaagtagtgtcggatattgattatgttccactcaaatctgctacgtgtattacacgatgcaatttaggtggtgctgtttgcagacaccatgcaaatgagtaccgacagtacttggatgcatataatatgatgatttctgctggatttagcctatggatttacaaacaatttgatacttataacctgtggaatacatttaccaggttacagagtttagaaaatgtggcttataatgttgttaataaaggacactttgatggacacgccggcgaagcacctgtttccatcattaataatgctgtttacacaaaggtagatggtattgatgtggagatctttgaaaataagacaacacttcctgttaatgttgcatttgagctttgggctaagcgtaacattaaaccagtgccagagattaagatactcaataatttgggtgttgatatcgctgctaatactgtaatctgggactacaaaagagaagccccagcacatgtatctacaataggtgtctgcacaatgactgacattgccaagaaacctactgagagtgcttgttcttcacttactgtcttgtttgatggtagagtggaaggacaggtagacctttttagaaacgcccgtaatggtgttttaataacagaaggttcagtcaaaggtctaacaccttcaaagggaccagcacaagctagcgtcaatggagtcacattaattggagaatcagtaaaaacacagtttaactactttaagaaagtagacggcattattcaacagttgcctgaaacctactttactcagagcagagacttagaggattttaagcccagatcacaaatggaaactgactttctcgagctcgctatggatgaattcatacagcgatataagctcgagggctatgccttcgaacacatcgtttatggagatttcagtcatggacaacttggcggtcttcatttaatgataggcttagccaagcgctcacaagattcaccacttaaattagaggattttatccctatggacagcacagtgaaaaattacttcataacagatgcgcaaacaggttcatcaaaatgtgtgtgttctgtgattgatcttttacttgatgactttgtcgagataataaagtcacaagatttgtcagtgatttcaaaagtggtcaaggttacaattgactatgctgaaatttcattcatgctttggtgtaaggatggacatgttgaaaccttctacccaaaactacaagcaagtcaagcgtggcaaccaggtgttgcgatgcctaacttgtacaagatgcaaagaatgcttcttgaaaagtgtgaccttcagaattatggtgaaaatgctgttataccaaaaggaataatgatgaatgtcgcaaagtatactcaactgtgtcaatacttaaatacacttactttagctgtaccctacaacatgagagttattcactttggtgctggctctgataaaggagttgcaccaggtacagctgtgctcagacaatggttgccaactggcacactacttgtcgattcagatcttaatgacttcgtctccgacgcagattctactttaattggagactgtgcaacagtacatacggctaataaatgggaccttattattagcgatatgtatgaccctaggaccaaacatgtgacaaaagagaatgactctaaagaagggtttttcacttatctgtgtggatttataaagcaaaaactagccctgggtggttctatagctgtaaagataacagagcattcttggaatgctgacctttacaagcttatgggccatttctcatggtggacagcttttgttacaaatgtaaatgcatcatcatcggaagcatttttaattggggctaactatcttggcaagccgaaggaacaaattgatggctataccatgcatgctaactacattttctggaggaacacaaatcctatccagttgtcttcctattcactctttgacatgagcaaatttcctcttaaattaagaggaactgctgtaatgtctcttaaggagaatcaaatcaatgatatgatttattctcttctggaaaaaggtaggcttatcattagagaaaacaacagagttgtggtttcaagtgatattcttgttaacaactaaacgaacatgtttattttcttattatttcttactctcactagtggtagtgaccttgaccggtgcaccacttttgatgatgttcaagctcctaattacactcaacatacttcatctatgaggggggtttactatcctgatgaaatttttagatcagacactctttatttaactcaggatttatttcttccattttattctaatgttacagggtttcatactattaatcatacgtttggcaaccctgtcataccttttaaggatggtatttattttgctgccacagagaaatcaaatgttgtccgtggttgggtttttggttctaccatgaacaacaagtcacagtcggtgattattattaacaattctactaatgttgttatacgagcatgtaactttgaattgtgtgacaaccctttctttgctgtttctaaacccatgggtacacagacacatactatgatattcgataatgcatttaattgcactttcgagtacatatctgatgccttttcgcttgatgtttcagaaaagtcaggtaattttaaacacttacgagagtttgtgtttaaaaataaagatgggtttctctatgtttataagggctatcaacctatagatgtagttcgtgatctaccttctggttttaacactttgaaacctatttttaagttgcctcttggtattaacattacaaattttagagccattcttacagccttttcacctgctcaagacatttggggcacgtcagctgcagcctattttgttggctatttaaagccaactacatttatgctcaagtatgatgaaaatggtacaatcacagatgctgttgattgttctcaaaatccacttgctgaactcaaatgctctgttaagagctttgagattgacaaaggaatttaccagacctctaatttcagggttgttccctcaggagatgttgtgagattccctaatattacaaacttgtgtccttttggagaggtttttaatgctactaaattcccttctgtctatgcatgggagagaaaaaaaatttctaattgtgttgctgattactctgtgctctacaactcaacatttttttcaacctttaagtgctatggcgtttctgccactaagttgaatgatctttgcttctccaatgtctatgcagattcttttgtagtcaagggagatgatgtaagacaaatagcgccaggacaaactggtgttattgctgattataattataaattgccagatgatttcatgggttgtgtccttgcttggaatactaggaacattgatgctacttcaactggtaattataattataaatataggtatcttagacatggcaagcttaggccctttgagagagacatatctaatgtgcctttctcccctgatggcaaaccttgcaccccacctgctcttaattgttattggccattaaatgattatggtttttacaccactactggcattggctaccaaccttacagagttgtagtactttcttttgaacttttaaatgcaccggccacggtttgtggaccaaaattatccactgaccttattaagaaccagtgtgtcaattttaattttaatggactcactggtactggtgtgttaactccttcttcaaagagatttcaaccatttcaacaatttggccgtgatgtttctgatttcactgattccgttcgagatcctaaaacatctgaaatattagacatttcaccttgctcttttgggggtgtaagtgtaattacacctggaacaaatgcttcatctgaagttgctgttctatatcaagatgttaactgcactgatgtttctacagcaattcatgcagatcaactcacaccagcttggcgcatatattctactggaaacaatgtattccagactcaagcaggctgtcttataggagctgagcatgtcgacacttcttatgagtgcgacattcctattggagctggcatttgtgctagttaccatacagtttctttattacgtagtactagccaaaaatctattgtggcttatactatgtctttaggtgctgatagttcaattgcttactctaataacaccattgctatacctactaacttttcaattagcattactacagaagtaatgcctgtttctatggctaaaacctccgtagattgtaatatgtacatctgcggagattctactgaatgtgctaatttgcttctccaatatggtagcttttgcacacaactaaatcgtgcactctcaggtattgctgctgaacaggatcgcaacacacgtgaagtgttcgctcaagtcaaacaaatgtacaaaaccccaactttgaaatattttggtggttttaatttttcacaaatattacctgaccctctaaagccaactaagaggtcttttattgaggacttgctctttaataaggtgacactcgctgatgctggcttcatgaagcaatatggcgaatgcctaggtgatattaatgctagagatctcatttgtgcgcagaagttcaatggacttacagtgttgccacctctgctcactgatgatatgattgctgcctacactgctgctctagttagtggtactgccactgctggatggacatttggtgctggcgctgctcttcaaataccttttgctatgcaaatggcatataggttcaatggcattggagttacccaaaatgttctctatgagaaccaaaaacaaatcgccaaccaatttaacaaggcgattagtcaaattcaagaatcacttacaacaacatcaactgcattgggcaagctgcaagacgttgttaaccagaatgctcaagcattaaacacacttgttaaacaacttagctctaattttggtgcaatttcaagtgtgctaaatgatatcctttcgcgacttgataaagtcgaggcggaggtacaaattgacaggttaattacaggcagacttcaaagccttcaaacctatgtaacacaacaactaatcagggctgctgaaatcagggcttctgctaatcttgctgctactaaaatgtctgagtgtgttcttggacaatcaaaaagagttgacttttgtggaaagggctaccaccttatgtccttcccacaagcagccccgcatggtgttgtcttcctacatgtcacgtatgtgccatcccaggagaggaacttcaccacagcgccagcaatttgtcatgaaggcaaagcatacttccctcgtgaaggtgtttttgtgtttaatggcacttcttggtttattacacagaggaacttcttttctccacaaataattactacagacaatacatttgtctcaggaaattgtgatgtcgttattggcatcattaacaacacagtttatgatcctctgcaacctgagcttgactcattcaaagaagagctggacaagtacttcaaaaatcatacatcaccagatgttgatcttggcgacatttcaggcattaacgcttctgtcgtcaacattcaaaaagaaattgaccgcctcaatgaggtcgctaaaaatttaaatgaatcactcattgaccttcaagaattgggaaaatatgagcaatatattaaatggccttggtatgtttggctcggcttcattgctggactaattgccatcgtcatggttacaatcttgctttgttgcatgactagttgttgcagttgcctcaagggtgcatgctcttgtggttcttgctgcaagtttgatgaggatgactctgagccagttctcaagggtgtcaaattacattacacataaacgaacttatggatttgtttatgagattttttactcttggatcaattactgcacagccagtaaaaattgacaatgcttctcctgcaagtactgttcatgctacagcaacgataccgctacaagcctcactccctttcggatggcttgttattggcgttgcatttcttgctgtttttcagagcgctaccaaaataattgcgctcaataaaagatggcagctagccctttataagggcttccagttcatttgcaatttactgctgctatttgttaccatctattcacatcttttgcttgtcgctgcaggtatggaggcgcaatttttgtacctctatgccttgatatattttctacaatgcatcaacgcatgtagaattattatgagatgttggctttgttggaagtgcaaatccaagaacccattactttatgatgccaactactttgtttgctggcacacacataactatgactactgtataccatataacagtgtcacagatacaattgtcgttactgaaggtgacggcatttcaacaccaaaactcaaagaagactaccaaattggtggttattctgaggataggcactcaggtgttaaagactatgtcgttgtacatggctatttcaccgaagtttactaccagcttgagtctacacaaattactacagacactggtattgaaaatgctacattcttcatctttaacaagcttgttaaagacccaccgaatgtgcaaatacacacaatcgacggctcttcaggagttgctaatccagcaatggatccaatttatgatgagccgacgacgactactagcgtgcctttgtaagcacaagaaagtgagtacgaacttatgtactcattcgtttcggaagaaacaggtacgttaatagttaatagcgtacttctttttcttgctttcgtggtattcttgctagtcacactagccatccttactgcgcttcgattgtgtgcgtactgctgcaatattgttaacgtgagtttagtaaaaccaacggtttacgtctactcgcgtgttaaaaatctgaactcttctgaaggagttcctgatcttctggtctaaacgaactaactattattattattctgtttggaactttaacattgcttatcatggcagacaacggtactattaccgttgaggagcttaaacaactcctggaacaatggaacctagtaataggtttcctattcctagcctggattatgttactacaatttgcctattctaatcggaacaggtttttgtacataataaagcttgttttcctctggctcttgtggccagtaacacttgcttgttttgtgcttgctgctgtctacagaattaattgggtgactggcgggattgcgattgcaatggcttgtattgtaggcttgatgtggcttagctacttcgttgcttccttcaggctgtttgctcgtacccgctcaatgtggtcattcaacccagaaacaaacattcttctcaatgtgcctctccgggggacaattgtgaccagaccgctcatggaaagtgaacttgtcattggtgctgtgatcattcgtggtcacttgcgaatggccggacactccctagggcgctgtgacattaaggacctgccaaaagagatcactgtggctacatcacgaacgctttcttattacaaattaggagcgtcgcagcgtgtaggcactgattcaggttttgctgcatacaaccgctaccgtattggaaactataaattaaatacagaccacgccggtagcaacgacaatattgctttgctagtacagtaagtgacaacagatgtttcatcttgttgacttccaggttacaatagcagggatattgattatcattatgaggactttcaggattgctatttggaatcttgacgttataataagttcaatagtgagacaattatttaagcctctaactaagaagaattattcggagttagatgatgaagaacctatggagttagattatccataaaacgaacatgaaaattattctcttcctgacattgattgtatttacatcttgcgagctatatcactatcaggagtgtgttagaggtacgactgtactactaaaagaaccttgcccatcaggaacatacgagggcaattcaccatttcaccctcttgctgacaataaatttgcactaacttgcactagcacacactttgcttttgcttgtgctgacggtactcgacatacctatcagctgcgtgcaagatcagtttcaccaaaacttttcatcagacaagaggaggttcaacaagagctctactcgccactttttctcattgttgctgctctagtatttttaatactttgcttcaccattaagagaaagacagaatgaatgagctcactttaattgacttctatttgtgctttttagcctttctgctattccttgttttaataatgcttattatattttggttttcactcgaaatccaggatctagaagaaccttgtaccaaagtctaaacgaacatgctcattgttttgacttgtatttctctatgcagttgcatatgcactgtagtacagcgctgtgcatctaataaacctcatgtgcttgaagatccttgtaaggtacaacactaggggtaatacttatagcactgcttggctttgtgctctaggaaaggttttaccttttcatagatggcacactatggttcaaacatgcacacctaatgttactatcaactgtcaagatccagctggtggtgcgcttatagctaggtgttggtaccttcatgaaggtcaccaaactgctgcatttagagacgtacttgttgttttaaataaacgaacaaattaaaatgtctgataatggaccccaatcaaaccaacgtagtgccccccgcattacatttggtggacccacagattcaactgacaataaccagaatggaggacgcaatggggcaaggccaaaacagcgccgaccccaaggtttacccaataatactgcgtcttggttcacagctctcactcagcatggcaaggaggaacttagattccctcgaggccagggcgttccaatcaacaccaatagtggtccagatgaccaaattggctactaccgaagagctacccgacgagttcgtggtggtgacggcaaaatgaaagagctcagccccagatggtacttctattacctaggaactggcccagaagcttcacttccctacggcgctaacaaagaaggcatcgtatgggttgcaactgagggagccttgaatacacccaaagaccacattggcacccgcaatcctaataacaatgctgccaccgtgctacaacttcctcaaggaacaacattgccaaaaggcttctacgcagagggaagcagaggcggcagtcaagcctcttctcgctcctcatcacgtagtcgcggtaattcaagaaattcaactcctggcagcagtaggggaaattctcctgctcgaatggctagcggaggtggtgaaactgccctcgcgctattgctgctagacagattgaaccagcttgagagcaaagtttctggtaaaggccaacaacaacaaggccaaactgtcactaagaaatctgctgctgaggcatctaaaaagcctcgccaaaaacgtactgccacaaaacagtacaacgtcactcaagcatttgggagacgtggtccagaacaaacccaaggaaatttcggggaccaagacctaatcagacaaggaactgattacaaacattggccgcaaattgcacaatttgctccaagtgcctctgcattctttggaatgtcacgcattggcatggaagtcacaccttcgggaacatggctgacttatcatggagccattaaattggatgacaaagatccacaattcaaagacaacgtcatactgctgaacaagcacattgacgcatacaaaacattcccaccaacagagcctaaaaaggacaaaaagaaaaagactgatgaagctcagcctttgccgcagagacaaaagaagcagcccactgtgactcttcttcctgcggctgacatggatgatttctccagacaacttcaaaattccatgagtggagcttctgctgattcaactcaggcataaacactcatgatgaccacacaaggcagatgggctatgtaaacgttttcgcaattccgtttacgatacatagtctactcttgtgcagaatgaattctcgtaactaaacagcacaagtaggtttagttaactttaatctcacatagcaatctttaatcaatgtgtaacattagggaggacttgaaagagccaccacattttcatcgaggccacgcggagtacgatcgagggtacagtgaataatgctagggagagctgcctatatggaagagccctaatgtgtaaaattaattttagtagtgctatccccatgtgattttaatagcttcttaggagaatgac

SEQ ID NO: 29759 - DNA, 29711 bp, SARS Coronavirus
tacccaggaaaagccaaccaacctcgatctcttgtagatctgttctctaaacgaactttaaaatctgtgtagctgtcgctcggctgcatgcctagtgcacctacgcagtataaacaataataaattttactgtcgttgacaagaaacgagtaactcgtccctcttctgcagactgcttacggtttcgtccgtgttgcagtcgatcatcagcatacctaggtttcgtccgggtgtgaccgaaaggtaagatggagagccttgttcttggtgtcaacgagaaaacacacgtccaactcagtttgcctgtccttcaggttagagacgtgctagtgcgtggcttcggggactctgtggaagaggccctatcggaggcacgtgaacacctcaaaaatggcacttgtggtctagtagagctggaaaaaggcgtactgccccagcttgaacagccctatgtgttcattaaacgttctgatgccttaagcaccaatcacggccacaaggtcgttgagctggttgcagaaatggacggcattcagtacggtcgtagcggtataacactgggagtactcgtgccacatgtgggcgaaaccccaattgcataccgcaatgttcttcttcgtaagaacggtaataagggagccggtggtcatagctatggcatcgatctaaagtcttatgacttaggtgacgagcttggcactgatcccattgaagattatgaacaaaactggaacactaagcatggcagtggtgcactccgtgaactcactcgtgagctcaatggaggtgcagtcactcgctatgtcgacaacaatttctgtggcccagatgggtaccctcttgattgcatcaaagattttctcgcacgcgcgggcaagtcaatgtgcactctttccgaacaacttgattacatcgagtcgaagagaggtgtctactgctgccgtgaccatgagcatgaaattgcctggttcactgagcgctctgataagagctacgagcaccagacacccttcgaaattaagagtgccaagaaatttgacactttcaaaggggaatgcccaaagtttgtgtttcctcttaactcaaaagtcaaagtcattcaaccacgtgttgaaaagaaaaagactgagggtttcatggggcgtatacgctctgtgtaccctgttgcatctccacaggagtgtaacaatatgcacttgtctaccttgatgaaatgtaatcattgcgatgaagtttcatggcagacgtgcgactttctgaaagccacttgtgaacattgtggcactgaaaatttagttattgaaggacctactacatgtgggtacctacctactaatgctgtagtgaaaatgccatgtcctgcctgtcaagacccagagattggacctgagcatagtgttgcagattatcacaaccactcaaacattgaaactcgactccgcaagggaggtaggactagatgttttggaggctgtgtgtttgcctatgttggctgctataataagcgtgcctactgggttcctcgtgctagtgctgatattggctcaggccatactggcattactggtgacaatgtggagaccttgaatgaggatctccttgagatactgagtcgtgaacgtgttaacattaacattgttggcgattttcatttgaatgaagaggttgccatcattttggcatctttctctgcttctacaagtgcctttattgacactataaagagtcttgattacaagtctttcaaaaccattgttgagtcctgcggtaactataaagttaccaagggaaagcccgtaaaaggtgcttggaacattggacaacagagatcagttttaacaccactgtgtggttttccctcacaggctgctggtgttatcagatcaatttttgcgcgcacacttgatgcagcaaaccactcaattcctgatttgcaaagagcagctgtcaccatacttgatggtatttctgaacagtcattacgtcttgtcgacgccatggtttatacttcagacctgctcaccaacagtgtcattattatggcatatgtaactggtggtcttgtacaacagacttctcagtggttgtctaatcttttgggcactactgttgaaaaactcaggcctatctttgaatggattgaggcgaaacttagtgcaggagttgaatttctcaaggatgcttgggagattctcaaatttctcattacaggtgtttttgacatcgtcaagggtcaaatacaggttgcttcagataacatcaaggattgtgtaaaatgcttcattgatgttgttaacaaggcactcgaaatgtgcattgatcaagtcactatcgctggcgcaaagttgcgatcactcaacttaggtgaagtcttcatcgctcaaagcaagggactttaccgtcagtgtatacgtggcaaggagcagctgcaactactcatgcctcttaaggcaccaaaagaagtaacctttcttgaaggtgattcacatgacacagtacttacctctgaggaggttgttctcaagaacggtgaactcgaagcactcgagacgcccgttgatagcttcacaaatggagctatcgttggcacaccagtctgtgtaaatggcctcatgctcttagagattaaggacaaagaacaatactgcgcattgtctcctggtttactggctacaaacaatgtctttcgcttaaaagggggtgcaccaattaaaggtgtaacctttggagaagatactgtttgggaagttcaaggttacaagaatgtgagaatcacatttgagcttgatgaacgtgttgacaaagtgcttaatgaaaagtgctctgtctacactgttgaatccggtaccgaagttactgagtttgcatgtgttgtagcagaggctgttgtgaagactttacaaccagtttctgatctccttaccaacatgggtattgatcttgatgagtggagtgtagctacattctacttatttgatgatgctggtgaagaaaacttttcatcacgtatgtattgttccttttaccctccagatgaggaagaagaggacgatgcagagtgtgaggaagaagaaattgatgaaacctgtgaacatgagtacggtacagaggatgattatcaaggtctccctctggaatttggtgcctcagctgaaacagttcgagttgaggaagaagaagaggaagactggctggatgatactactgagcaatcagagattgagccagaaccagaacctacacctgaagaaccagttaatcagtttactggttatttaaaacttactgacaatgttgccattaaatgtgttgacatcgttaaggaggcacaaagtgctaatcctatggtgattgtaaatgctgctaacatacacctgaaacatggtggtggtgtagcaggtgcactcaacaaggcaaccaatggtgccatgcaaaaggagagtgatgattacattaagctaaatggccctcttacagtaggagggtcttgtttgctttctggacataatcttgctaagaagtgtctgcatgttgttggacctaacctaaatgcaggtgaggacatccagcttcttaaggcagcatatgaaaatttcaattcacaggacatcttacttgcaccattgttgtcagcaggcatatttggtgctaaaccacttcagtctttacaagtgtgcgtgcagacggttcgtacacaggtttatattgcagtcaatgacaaagctctttatgagcaggttgtcatggattatcttgataacctgaagcctagagtggaagcacctaaacaagaggagccaccaaacacagaagattccaaaactgaggagaaatctgtcgtacagaagcctgtcgatgtgaagccaaaaattaaggcctgcattgatgaggttaccacaacactggaagaaactaagtttcttaccaataagttactcttgtttgctgatatcaatggtaagctttaccatgattctcagaacatgcttagaggtgaagatatgtctttccttgagaaggatgcaccttacatggtaggtgatgttatcactagtggtgatatcacttgtgttgtaataccctccaaaaaggctggtggcactactgagatgctctcaagagctttgaagaaagtgccagttgatgagtatataaccacgtaccctggacaaggatgtgctggttatacacttgaggaagctaagactgctcttaagaaatgcaaatctgcattttatgtactaccttcagaagcacctaatgctaaggaagagattctaggaactgtatcctggaatttgagagaaatgcttgctcatgctgaagagacaagaaaattaatgcctatatgcatggatgttagagccataatggcaaccatccaacgtaagtataaaggaattaaaattcaagagggcatcgttgactatggtgtccgattcttcttttatactagtaaagagcctgtagcttctattattacgaagctgaactctctaaatgagccgcttgtcacaatgccaattggttatgtgacacatggttttaatcttgaagaggctgcgcgctgtatgcgttctcttaaagctcctgccgtagtgtcagtatcatcaccagatgctgttactacatataatggatacctcacttcgtcatcaaagacatctgaggagcactttgtagaaacagtttctttggctggctcttacagagattggtcctattcaggacagcgtacagagttaggtgttgaatttcttaagcgtggtgacaaaattgtgtaccacactctggagagccccgtcgagtttcatcttgacggtgaggttctttcacttgacaaactaaagagtctcttatccctgcgggaggttaagactataaaagtgttcacaactgtggacaacactaatctccacacacagcttgtggatatgtctatgacatatggacagcagtttggtccaacatacttggatggtgctgatgttacaaaaattaaacctcatgtaaatcatgagggtaagactttctttgtactacctagtgatgacacactacgtagtgaagctttcgagtactaccatactcttgatgagagttttcttggtaggtacatgtctgctttaaaccacacaaagaaatggaaatttcctcaagttggtggtttaacttcaattaaatgggctgataacaattgttatttgtctagtgttttattagcacttcaacagcttgaagtcaaattcaatgcaccagcacttcaagaggcttattatagagcccgtgctggtgatgctgctaacttttgtgcactcatactcgcttacagtaataaaactgttggcgagcttggtgatgtcagagaaactatgacccatcttctacagcatgctaatttggaatctgcaaagcgagttcttaatgtggtgtgtaaacattgtggtcagaaaactactaccttaacgggtgtagaagctgtgatgtatatgggtactctatcttatgataatcttaagacaggtgtttccattccatgtgtgtgtggtcgtgatgctacacaatatctagtacaacaagagtcttcttttgttatgatgtctgcaccacctgctgagtataaattacagcaaggtacattcttatgtgcgaatgagtacactggtaactatcagtgtggtcattacactcatataactgctaaggagaccctctatcgtattgacggagctcaccttacaaagatgtcagagtacaaaggaccagtgactgatgttttctacaaggaaacatcttacactacaaccatcaagcctgtgtcgtataaactcgatggagttacttacacagagattgaaccaaaattggatgggtattataaaaaggataatgcttactatacagagcagcctatagaccttgtaccaactcaaccattaccaaatgcgagttttgataatttcaaactcacatgttctaacacaaaatttgctgatgatttaaatcaaatgacaggcttcacaaagccagcttcacgagagctatctgtcacattcttcccagacttgaatggcgatgtagtggctattgactatagacactattcagcgagtttcaagaaaggtgctaaattactgcataagccaattgtttggcacattaaccaggctacaaccaagacaacgttcaaaccaaacacttggtgtttacgttgtctttggagtacaaagccagtagatacttcaaattcatttgaagttctggcagtagaagacacacaaggaatggacaatcttgcttgtgaaagtcaacaacccacctctgaagaagtagtggaaaatcctaccatacagaaggaagtcatagagtgtgacgtgaaaactaccgaagttgtaggcaatgtcatacttaaaccatcagatgaaggtgttaaagtaacacaagagttaggtcatgaggatcttatggctgcttatgtggaaaacacaagcattaccattaagaaacctaatgagctttcactagccttaggtttaaaaacaattgccactcatggtattgctgcaattaatagtgttccttggagtaaaattttggcttatgtcaaaccattcttaggacaagcagcaattacaacatcaaattgcgctaagagattagcacaacgtgtgtttaacaattatatgccttatgtgtttacattattgttccaattgtgtacttttactaaaagtaccaattctagaattagagcttcactacctacaactattgctaaaaatagtgttaagagtgttgctaaattatgtttggatgccggcattaattatgtgaagtcacccaaattttctaaattgttcacaatcgctatgtggctattgttgttaagtatttgcttaggttctctaatctgtgtaactgctgcttttggtgtactcttatctaattttggtgctccttcttattgtaatggcgttagagaattgtatcttaattcgtctaacgttactactatggatttctgtgaaggttcttttccttgcagcatttgtttaagtggattagactcccttgattcttatccagctcttgaaaccattcaggtgacgatttcatcgtacaagctagacttgacaattttaggtctggccgctgagtgggttttggcatatatgttgttcacaaaattcttttatttattaggtctttcagctataatgcaggtgttctttggctattttgctagtcatttcatcagcaattcttggctcatgtggtttatcattagtattgtacaaatggcacccgtttctgcaatggttaggatgtacatcttctttgcttctttctactacatatggaagagctatgttcatatcatggatggttgcacctcttcgacttgcatgatgtgctataagcgcaatcgtgccacacgcgttgagtgtacaactattgttaatggcatgaagagatctttctatgtctatgcaaatggaggccgtggcttctgcaagactcacaattggaattgtctcaattgtgacacattttgcactggtagtacattcattagtgatgaagttgctcgtgatttgtcactccagtttaaaagaccaatcaaccctactgaccagtcatcgtatattgttgatagtgttgctgtgaaaaatggcgcgcttcacctctactttgacaaggctggtcaaaagacctatgagagacatccgctctcccattttgtcaatttagacaatttgagagctaacaacactaaaggttcactgcctattaatgtcatagtttttgatggcaagtccaaatgcgacgagtctgcttctaagtctgcttctgtgtactacagtcagctgatgtgccaacctattctgttgcttgaccaagctcttgtatcagacgttggagatagtactgaagtttccgttaagatgtttgatgcttatgtcgacaccttttcagcaacttttagtgttcctatggaaaaacttaaggcacttgttgctacagctcacagcgagttagcaaagggtgtagctttagatggtgtcctttctacattcgtgtcagctgcccgacaaggtgttgttgataccgatgttgacacaaaggatgttattgaatgtctcaaactttcacatcactctgacttagaagtgacaggtgacagttgtaacaatttcatgctcacctataataaggttgaaaacatgacgcccagagatcttggcgcatgtattgactgtaatgcaaggcatatcaatgcccaagtagcaaaaagtcacaatgtttcactcatctggaatgtaaaagactacatgtctttatctgaacagctgcgtaaacaaattcgtagtgctgccaagaagaacaacataccttttagactaacttgtgctacaactagacaggttgtcaatgtcataactactaaaatctcactcaagggtggtaagattgttagtacttgttttaaacttatgcttaaggccacattattgtgcgttcttgctgcattggtttgttatatcgttatgccagtacatacattgtcaatccatgatggttacacaaatgaaatcattggttacaaagccattcaggatggtgtcactcgtgacatcatttctactgatgattgttttgcaaataaacatgctggttttgacgcatggtttagccagcgtggtggttcatacaaaaatgacaaaagctgccctgtagtagctgctatcattacaagagagattggtttcatagtgcctggcttaccgggtactgtgctgagagcaatcaatggtgacttcttgcattttctacctcgtgtttttagtgctgttggcaacatttgctacacaccttccaaactcattgagtatagtgattttgctacctctgcttgcgttcttgctgctgagtgtacaatttttaaggatgctatgggcaaacctgtgccatattgttatgacactaatttgctagagggttctatttcttatagtgagcttcgtccagacactcgttatgtgcttatggatggttccatcatacagtttcctaacacttacctggagggttctgttagagtagtaacaacttttgatgctgagtactgtagacatggtacatgcgaaaggtcagaagtaggtatttgcctatctaccagtggtagatgggttcttaataatgagcattacagagctctatcaggagttttctgtggtgttgatgcgatgaatctcatagctaacatctttactcctcttgtgcaacctgtgggtgctttagatgtgtctgcttcagtagtggctggtggtattattgccatattggtgacttgtgctgcctactactttatgaaattcagacgtgtttttggtgagtacaaccatgttgttgctgctaatgcacttttgtttttgatgtctttcactatactctgtctggtaccagcttacagctttctgccgggagtctactcagtcttttacttgtacttgacattctatttcaccaatgatgtttcattcttggctcaccttcaatggtttgccatgttttctcctattgtgcctttttggataacagcaatctatgtattctgtatttctctgaagcactgccattggttctttaacaactatcttaggaaaagagtcatgtttaatggagttacatttagtaccttcgaggaggctgctttgtgtacctttttgctcaacaaggaaatgtacctaaaattgcgtagcgagacactgttgccacttacacagtataacaggtatcttgctctatataacaagtacaagtatttcagtggagccttagatactaccagctatcgtgaagcagcttgctgccacttagcaaaggctctaaatgactttagcaactcaggtgctgatgttctctaccaaccaccacagacatcaatcacttctgctgttctgcagagtggttttaggaaaatggcattcccgtcaggcaaagttgaagggtgcatggtacaagtaacctgtggaactacaactcttaatggattgtggttggatgacacagtatactgtccaagacatgtcatttgcacagcagaagacatgcttaatcctaactatgaagatctgctcattcgcaaatccaaccatagctttcttgttcaggctggcaatgttcaacttcgtgttattggccattctatgcaaaattgtctgcttaggcttaaagttgatacttctaaccctaagacacccaagtataaatttgtccgtatccaacctggtcaaacattttcagttctagcatgctacaatggttcaccatctggtgtttatcagtgtgccatgagacctaatcataccattaaaggttctttccttaatggatcatgtggtagtgttggttttaacattgattatgattgcgtgtctttctgctatatgcatcatatggagcttccaacaggagtacacgctggtactgacttagaaggtaaattctatggtccatttgttgacagacaaactgcacaggctgcaggtacagacacaaccataacattaaatgttttggcatggctgtatgctgctgttatcaatggtgataggtggtttcttaatagattcaccactactttgaatgactttaaccttgtggcaatgaagtacaactatgaacctttgacacaagatcatgttgacatattgggacctctttctgctcaaacaggaattgccgtcttagatatgtgtgctgctttgaaagagctgctgcagaatggtatgaatggtcgtactatccttggtagcactattttagaagatgagtttacaccatttgatgttgttagacaatgctctggtgttaccttccaaggtaagttcaagaaaattgttaagggcactcatcattggatgcttttaactttcttgacatcactattgattcttgttcaaagtacacagtggtcactgtttttctttgtttacgagaatgctttcttgccatttactcttggtattatggcaattgctgcatgtgctatgctgcttgttaagcataagcacgcattcttgtgcttgtttctgttaccttctcttgcaacagttgcttactttaatatggtctacatgcctgctagctgggtgatgcgtatcatgacatggcttgaattggctgacactagcttgtctggttataggcttaaggattgtgttatgtatgcttcagctttagttttgcttattctcatgacagctcgcactgtttatgatgatgctgctagacgtgtttggacactgatgaatgtcattacacttgtttacaaagtctactatggtaatgctttagatcaagctatttccatgtgggccttagttatttctgtaacctctaactattctggtgtcgttacgactatcatgtttttagctagagctatagtgtttgtgtgtgttgagtattacccattgttatttattactggcaacaccttacagtgtatcatgcttgtttattgtttcttaggctattgttgctgctgctactttggccttttctgtttactcaaccgttacttcaggcttactcttggtgtttatgactacttggtctctacacaagaatttaggtatatgaactcccaggggcttttgcctcctaagagtagtattgatgctttcaagcttaacattaagttgttgggtattggaggtaaaccatgtatcaaggttgctactgtacagtctaaaatgtctgacgtaaagtgcacatctgtggtactgctctcggttcttcaacaacttagagtagagtcatcttctaaattgtgggcacaatgtgtacaactccacaatgatattcttcttgcaaaagacacaactgaagctttcgagaagatggtttctcttttgtctgttttgctatccatgcagggtgctgtagacattaataggttgtgcgaggaaatgctcgataaccgtgctactcttcaggctattgcttcagaatttagttctttaccatcatatgccgcttatgccactgcccaggaggcctatgagcaggctgtagctaatggtgattctgaagtcgttctcaaaaagttaaagaaatctttgaatgtggctaaatctgagtttgaccgtgatgctgccatgcaacgcaagttggaaaagatggcagatcaggctatgacccaaatgtacaaacaggcaagatctgaggacaagagggcaaaagtaactagtgctatgcaaacaatgctcttcactatgcttaggaagcttgataatgatgcacttaacaacattatcaacaatgcgcgtgatggttgtgttccactcaacatcataccattgactacagcagccaaactcatggttgttgtccctgattatggtacctacaagaacacttgtgatggtaacacctttacatatgcatctgcactctgggaaatccagcaagttgttgatgcggatagcaagattgttcaacttagtgaaattaacatggacaattcaccaaatttggcttggcctcttattgttacagctctaagagccaactcagctgttaaactacagaataatgaactgagtccagtagcactacgacagatgtcctgtgcggctggtaccacacaaacagcttgtactgatgacaatgcacttgcctactataacaattcgaagggaggtaggtttgtgctggcattactatcagaccaccaagatctcaaatgggctagattccctaagagtgatggtacaggtacaatttacacagaactggaaccaccttgtaggtttgttacagacacaccaaaagggcctaaagtgaaatacttgtacttcatcaaaggcttaaacaacctaaatagaggtatggtgctgggcagtttagctgctacagtacgtcttcaggctggaaatgctacagaagtacctgccaattcaactgtgctttccttctgtgcttttgcagtagaccctgctaaagcatataaggattacctagcaagtggaggacaaccaatcaccaactgtgtgaagatgttgtgtacacacactggtacaggacaggcaattactgtaacaccagaagctaacatggaccaagagtcctttggtggtgcttcatgttgtctgtattgtagatgccacattgaccatccaaatcctaaaggattctgtgacttgaaaggtaagtacgtccaaatacctaccacttgtgctaatgacccagtgggttttacacttagaaacacagtctgtaccgtctgcggaatgtggaaaggttatggctgtagttgtgaccaactccgcgaacccttgatgcagtctgcggatgcatcaacgtttttaaacgggtttgcggtgtaagtgcagcccgtcttacaccgtgcggcacaggcactagtactgatgtcgtctacagggcttttgatatttacaacgaaaaagttgctggttttgcaaagttcctaaaaactaattgctgtcgcttccaggagaaggatgaggaaggcaatttattagactcttactttgtagttaagaggcatactatgtctaactaccaacatgaagagactatttataacttggttaaagattgtccagcggttgctgtccatgactttttcaagtttagagtagatggtgacatggtaccacatatatcacgtcagcgtctaactaaatacacaatggctgatttagtctatgctctacgtcattttgatgagggtaattgtgatacattaaaagaaatactcgtcacatacaattgctgtgatgatgattatttcaataagaaggattggtatgacttcgtagagaatcctgacatcttacgcgtatatgctaacttaggtgagcgtgtacgccaatcattattaaagactgtacaattctgcgatgctatgcgtgatgcaggcattgtaggcgtactgacattagataatcaggatcttaatgggaactggtacgatttcggtgatttcgtacaagtagcaccaggctgcggagttcctattgtggattcatattactcattgctgatgcccatcctcactttgactagggcattggctgctgagtcccatatggatgctgatctcgcaaaaccacttattaagtgggatttgctgaaatatgattttacggaagagagactttgtctcttcgaccgttattttaaatattgggaccagacataccatcccaattgtattaactgtttggatgataggtgtatccttcattgtgcaaactttaatgtgttattttctactgtgtttccacctacaagttttggaccactagtaagaaaaatatttgtagatggtgttccttttgttgtttcaactggataccattttcgtgagttaggagtcgtacataatcaggatgtaaacttacatagctcgcgtctcagtttcaaggaacttttagtgtatgctgctgatccagctatgcatgcagcttctggcaatttattgctagataaacgcactacatgcttttcagtagctgcactaacaaacaatgttgcttttcaaactgtcaaacccggtaattttaataaagacttttatgactttgctgtgtctaaaggtttctttaaggaaggaagttctgttgaactaaaacacttcttctttgctcaggatggcaacgctgctatcagtgattatgactattatcgttataatctgccaacaatgtgtgatatcagacaactcctattcgtagttgaagttgttgataaatactttgattgttacgatggtggctgtattaatgccaaccaagtaatcgttaacaatctggataaatcagctggtttcccatttaataaatggggtaaggctagactttattatgactcaatgagttatgaggatcaagatgcacttttcgcgtatactaagcgtaatgtcatccctactataactcaaatgaatcttaagtatgccattagtgcaaagaatagagctcgcaccgtagctggtgtctctatctgtagtactatgacaaatagacagtttcatcagaaattattgaagtcaatagccgccactagaggagctactgtggtaattggaacaagcaagttttacggtggctggcataatatgttaaaaactgtttacagtgatgtagaaactccacaccttatgggttgggattatccaaaatgtgacagagccatgcctaacatgcttaggataatggcctctcttgttcttgctcgcaaacataacacttgctgtaacttatcacaccgtttctacaggttagctaacgagtgtgcgcaagtattaagtgagatggtcatgtgtggcggctcactatatgttaaaccaggtggaacatcatccggtgatgctacaactgcttatgctaatagtgtctttaacatttgtcaagctgttacagccaatgtaaatgcacttctttcaactgatggtaataagatagctgacaagtatgtccgcaatctacaacacaggctctatgagtgtctctatagaaatagggatgttgatcatgaattcgtggatgagttttacgcttacctgcgtaaacatttctccatgatgattctttctgatgatgccgttgtgtgctataacagtaactatgcggctcaaggtttagtagctagcattaagaactttaaggcagttctttattatcaaaataatgtgttcatgtctgaggcaaaatgttggactgagactgaccttactaaaggacctcacgaattttgctcacagcatacaatgctagttaaacaaggagatgattacgtgtacctgccttacccagatccatcaagaatattaggcgcaggctgttttgtcgatgatattgtcaaaacagatggtacacttatgattgaaaggttcgtgtcactggctattgatgcttacccacttacaaaacatcctaatcaggagtatgctgatgtctttcacttgtatttacaatacattagaaagttacatgatgagcttactggccacatgttggacatgtattccgtaatgctaactaatgataacacctcacggtactgggaacctgagttttatgaggctatgtacacaccacatacagtcttgcaggctgtaggtgcttgtgtattgtgcaattcacagacttcacttcgttgcggtgcctgtattaggagaccattcctatgttgcaagtgctgctatgaccatgtcatttcaacatcacacaaattagtgttgtctgttaatccctatgtttgcaatgccccaggttgtgatgtcactgatgtgacacaactgtatctaggaggtatgagctattattgcaagtcacataagcctcccattagttttccattatgtgctaatggtcaggtttttggtttatacaaaaacacatgtgtaggcagtgacaatgtcactgacttcaatgcgatagcaacatgtgattggactaatgctggcgattacatacttgccaacacttgtactgagagactcaagcttttcgcagcagaaacgctcaaagccactgaggaaacatttaagctgtcatatggtattgccactgtacgcgaagtactctctgacagagaattgcatctttcatgggaggttggaaaacctagaccaccattgaacagaaactatgtctttactggttaccgtgtaactaaaaatagtaaagtacagattggagagtacacctttgaaaaaggtgactatggtgatgctgttgtgtacagaggtactacgacatacaagttgaatgttggtgattactttgtgttgacatctcacactgtaatgccacttagtgcacctactctagtgccacaagagcactatgtgagaattactggcttgtacccaacactcaacatctcagatgagttttctagcaatgttgcaaattatcaaaaggtcggcatgcaaaagtactctacactccaaggaccacctggtactggtaagagtcattttgccatcggacttgctctctattacccatctgctcgcatagtgtatacggcatgctctcatgcagctgttgatgccctatgtgaaaaggcattaaaatatttgcccatagataaatgtagtagaatcatacctgcgcgtgcgcgcgtagagtgttttgataaattcaaagtgaattcaacactagaacagtatgttttctgcactgtaaatgcattgccagaaacaactgctgacattgtagtctttgatgaaatctctatggctactaattatgacttgagtgttgtcaatgctagacttcgtgcaaaacactacgtctatattggcgatcctgctcaattaccagccccccgcacattgctgactaaaggcacactagaaccagaatattttaattcagtgtgcagacttatgaaaacaataggtccagacatgttccttggaacttgtcgccgttgtcctgctgaaattgttgacactgtgagtgctttagtttatgacaataagctaaaagcacacaaggataagtcagctcaatgcttcaaaatgttctacaaaggtgttattacacatgatgtttcatctgcaatcaacagacctcaaataggcgttgtaagagaatttcttacacgcaatcctgcttggagaaaagctgtttttatctcaccttataattcacagaacgctgtagcttcaaaaatcttaggattgcctacgcagactgttgattcatcacagggttctgaatatgactatgtcatattcacacaaactactgaaacagcacactcttgtaatgtcaaccgcttcaatgtggctatcacaagggcaaaaattggcattttgtgcataatgtctgatagagatctttatgacaaactgcaatttacaagtctagaaataccacgtcgcaatgtggctacattacaagcagaaaatgtaactggactttttaaggactgtagtaagatcattactggtcttcatcctacacaggcacctacacacctcagcgttgatataaagttcaagactgaaggattatgtgttgacataccaggcataccaaaggacatgacctaccgtagactcatctctatgatgggtttcaaaatgaattaccaagtcaatggttaccctaatatgtttatcacccgcgaagaagctattcgtcacgttcgtgcgtggattggctttgatgtagagggctgtcatgcaactagagatgctgtgggtactaacctacctctccagctaggattttctacaggtgttaacttagtagctgtaccgactggttatgttgacactgaaaataacacagaattcaccagagttaatgcaaaacctccaccaggtgaccagtttaaacatcttataccactcatgtataaaggcttgccctggaatgtagtgcgtattaagatagtacaaatgctcagtgatacactgaaaggattgtcagacagagtcgtgttcgtcctttgggcgcatggctttgagcttacatcaatgaagtactttgtcaagattggacctgaaagaacgtgttgtctgtgtgacaaacgtgcaacttgcttttctacttcatcagatacttatgcctgctggaatcattctgtgggttttgactatgtctataacccatttatgattgatgttcagcagtggggctttacgggtaaccttcagagtaaccatgaccaacattgccaggtacatggaaatgcacatgtggctagttgtgatgctatcatgactagatgtttagcagtccatgagtgctttgttaagcgcgttgattggtctgttgaataccctattataggagatgaactgagggttaattctgcttgcagaaaagtacaacacatggttgtgaagtctgcattgcttgctgataagtttccagttcttcatgacattggaaatccaaaggctatcaagtgtgtgcctcaggctgaagtagaatggaagttctacgatgctcagccatgtagtgacaaagcttacaaaatagaggaactcttctattcttatgctatacatcacgataaattcactgatggtgtttgtttgttttggaattgtaacgttgatcgttacccagccaatgcaattgtgtgtaggtttgacacaagagtcttgtcaaacttgaacttaccaggctgtgatggtggtagtttgtatgtgaataagcatgcattccacactccagctttcgataaaagtgcatttactaatttaaagcaattgcctttcttttactattctgatagtccttgtgagtctcatggcaaacaagtagtgtcggatattgattatgttccactcaaatctgctacgtgtattacacgatgcaatttaggtggtgctgtttgcagacaccatgcaaatgagtaccgacagtacttggatgcatataatatgatgatttctgctggatttagcctatggatttacaaacaatttgatacttataacctgtggaatacatttaccaggttacagagtttagaaaatgtggcttataatgttgttaataaaggacactttgatggacacgccggcgaagcacctgtttccatcattaataatgctgtttacacaaaggtagatggtattgatgtggagatctttgaaaataagacaacacttcctgttaatgttgcatttgagctttgggctaagcgtaacattaaaccagtgccagagattaagatactcaataatttgggtgttgatatcgctgctaatactgtaatctgggactacaaaagagaagccccagcacatgtatctacaataggtgtctgcacaatgactgacattgccaagaaacctactgagagtgcttgttcttcacttactgtcttgtttgatggtagagtggaaggacaggtagacctttttagaaacgcccgtaatggtgttttaataacagaaggttcagtcaaaggtctaacaccttcaaagggaccagcacaagctagcgtcaatggagtcacattaattggagaatcagtaaaaacacagtttaactactttaagaaagtagacggcattattcaacagttgcctgaaacctactttactcagagcagagacttagaggattttaagcccagatcacaaatggaaactgactttctcgagctcgctatggatgaattcatacagcgatataagctcgagggctatgccttcgaacacatcgtttatggagatttcagtcatggacaacttggcggtcttcatttaatgataggcttagccaagcgctcacaagattcaccacttaaattagaggattttatccctatggacagcacagtgaaaaattacttcataacagatgcgcaaacaggttcatcaaaatgtgtgtgttctgtgattgatcttttacttgatgactttgtcgagataataaagtcacaagatttgtcagtgatttcaaaagtggtcaaggttacaattgactatgctgaaatttcattcatgctttggtgtaaggatggacatgttgaaaccttctacccaaaactacaagcaagtcaagcgtggcaaccaggtgttgcgatgcctaacttgtacaagatgcaaagaatgcttcttgaaaagtgtgaccttcagaattatggtgaaaatgctgttataccaaaaggaataatgatgaatgtcgcaaagtatactcaactgtgtcaatacttaaatacacttactttagctgtaccctacaacatgagagttattcactttggtgctggctctgataaaggagttgcaccaggtacagctgtgctcagacaatggttgccaactggcacactacttgtcgattcagatcttaatgacttcgtctccgacgcagattctactttaattggagactgtgcaacagtacatacggctaataaatgggaccttattattagcgatatgtatgaccctaggaccaaacatgtgacaaaagagaatgactctaaagaagggtttttcacttatctgtgtggatttataaagcaaaaactagccctgggtggttctatagctgtaaagataacagagcattcttggaatgctgacctttacaagcttatgggccatttctcatggtggacagcttttgttacaaatgtaaatgcatcatcatcggaagcatttttaattggggctaactatcttggcaagccgaaggaacaaattgatggctataccatgcatgctaactacattttctggaggaacacaaatcctatccagttgtcttcctattcactctttgacatgagcaaatttcctcttaaattaagaggaactgctgtaatgtctcttaaggagaatcaaatcaatgatatgatttattctcttctggaaaaaggtaggcttatcattagagaaaacaacagagttgtggtttcaagtgatattcttgttaacaactaaacgaacatgtttattttcttattatttcttactctcactagtggtagtgaccttgaccggtgcaccacttttgatgatgttcaagctcctaattacactcaacatacttcatctatgaggggggtttactatcctgatgaaatttttagatcagacactctttatttaactcaggatttatttcttccattttattctaatgttacagggtttcatactattaatcatacgtttggcaaccctgtcataccttttaaggatggtatttattttgctgccacagagaaatcaaatgttgtccgtggttgggtttttggttctaccatgaacaacaagtcacagtcggtgattattattaacaattctactaatgttgttatacgagcatgtaactttgaattgtgtgacaaccctttctttgctgtttctaaacccatgggtacacagacacatactatgatattcgataatgcatttaattgcactttcgagtacatatctgatgccttttcgcttgatgtttcagaaaagtcaggtaattttaaacacttacgagagtttgtgtttaaaaataaagatgggtttctctatgtttataagggctatcaacctatagatgtagttcgtgatctaccttctggttttaacactttgaaacctatttttaagttgcctcttggtattaacattacaaattttagagccattcttacagccttttcacctgctcaagacatttggggcacgtcagctgcagcctattttgttggctatttaaagccaactacatttatgctcaagtatgatgaaaatggtacaatcacagatgctgttgattgttctcaaaatccacttgctgaactcaaatgctctgttaagagctttgagattgacaaaggaatttaccagacctctaatttcagggttgttccctcaggagatgttgtgagattccctaatattacaaacttgtgtccttttggagaggtttttaatgctactaaattcccttctgtctatgcatgggagagaaaaaaaatttctaattgtgttgctgattactctgtgctctacaactcaacatttttttcaacctttaagtgctatggcgtttctgccactaagttgaatgatctttgcttctccaatgtctatgcagattcttttgtagtcaagggagatgatgtaagacaaatagcgccaggacaaactggtgttattgctgattataattataaattgccagatgatttcatgggttgtgtccttgcttggaatactaggaacattgatgctacttcaactggtaattataattataaatataggtatcttagacatggcaagcttaggccctttgagagagacatatctaatgtgcctttctcccctgatggcaaaccttgcaccccacctgctcttaattgttattggccattaaatgattatggtttttacaccactactggcattggctaccaaccttacagagttgtagtactttcttttgaacttttaaatgcaccggccacggtttgtggaccaaaattatccactgaccttattaagaaccagtgtgtcaattttaattttaatggactcactggtactggtgtgttaactccttcttcaaagagatttcaaccatttcaacaatttggccgtgatgtttctgatttcactgattccgttcgagatcctaaaacatctgaaatattagacatttcaccttgctcttttgggggtgtaagtgtaattacacctggaacaaatgcttcatctgaagttgctgttctatatcaagatgttaactgcactgatgtttctacagcaattcatgcagatcaactcacaccagcttggcgcatatattctactggaaacaatgtattccagactcaagcaggctgtcttataggagctgagcatgtcgacacttcttatgagtgcgacattcctattggagctggcatttgtgctagttaccatacagtttctttattacgtagtactagccaaaaatctattgtggcttatactatgtctttaggtgctgatagttcaattgcttactctaataacaccattgctatacctactaacttttcaattagcattactacagaagtaatgcctgtttctatggctaaaacctccgtagattgtaatatgtacatctgcggagattctactgaatgtgctaatttgcttctccaatatggtagcttttgcacacaactaaatcgtgcactctcaggtattgctgctgaacaggatcgcaacacacgtgaagtgttcgctcaagtcaaacaaatgtacaaaaccccaactttgaaatattttggtggttttaatttttcacaaatattacctgaccctctaaagccaactaagaggtcttttattgaggacttgctctttaataaggtgacactcgctgatgctggcttcatgaagcaatatggcgaatgcctaggtgatattaatgctagagatctcatttgtgcgcagaagttcaatggacttacagtgttgccacctctgctcactgatgatatgattgctgcctacactgctgctctagttagtggtactgccactgctggatggacatttggtgctggcgctgctcttcaaataccttttgctatgcaaatggcatataggttcaatggcattggagttacccaaaatgttctctatgagaaccaaaaacaaatcgccaaccaatttaacaaggcgattagtcaaattcaagaatcacttacaacaacatcaactgcattgggcaagctgcaagacgttgttaaccagaatgctcaagcattaaacacacttgttaaacaacttagctctaattttggtgcaatttcaagtgtgctaaatgatatcctttcgcgacttgataaagtcgaggcggaggtacaaattgacaggttaattacaggcagacttcaaagccttcaaacctatgtaacacaacaactaatcagggctgctgaaatcagggcttctgctaatcttgctgctactaaaatgtctgagtgtgttcttggacaatcaaaaagagttgacttttgtggaaagggctaccaccttatgtccttcccacaagcagccccgcatggtgttgtcttcctacatgtcacgtatgtgccatcccaggagaggaacttcaccacagcgccagcaatttgtcatgaaggcaaagcatacttccctcgtgaaggtgtttttgtgtttaatggcacttcttggtttattacacagaggaacttcttttctccacaaataattactacagacaatacatttgtctcaggaaattgtgatgtcgttattggcatcattaacaacacagtttatgatcctctgcaacctgagcttgactcattcaaagaagagctggacaagtacttcaaaaatcatacatcaccagatgttgatcttggcgacatttcaggcattaacgcttctgtcgtcaacattcaaaaagaaattgaccgcctcaatgaggtcgctaaaaatttaaatgaatcactcattgaccttcaagaattgggaaaatatgagcaatatattaaatggccttggtatgtttggctcggcttcattgctggactaattgccatcgtcatggttacaatcttgctttgttgcatgactagttgttgcagttgcctcaagggtgcatgctcttgtggttcttgctgcaagtttgatgaggatgactctgagccagttctcaagggtgtcaaattacattacacataaacgaacttatggatttgtttatgagattttttactcttggatcaattactgcacagccagtaaaaattgacaatgcttctcctgcaagtactgttcatgctacagcaacgataccgctacaagcctcactccctttcggatggcttgttattggcgttgcatttcttgctgtttttcagagcgctaccaaaataattgcgctcaataaaagatggcagctagccctttataagggcttccagttcatttgcaatttactgctgctatttgttaccatctattcacatcttttgcttgtcgctgcaggtatggaggcgcaatttttgtacctctatgccttgatatattttctacaatgcatcaacgcatgtagaattattatgagatgttggctttgttggaagtgcaaatccaagaacccattactttatgatgccaactactttgtttgctggcacacacataactatgactactgtataccatataacagtgtcacagatacaattgtcgttactgaaggtgacggcatttcaacaccaaaactcaaagaagactaccaaattggtggttattctgaggataggcactcaggtgttaaagactatgtcgttgtacatggctatttcaccgaagtttactaccagcttgagtctacacaaattactacagacactggtattgaaaatgctacattcttcatctttaacaagcttgttaaagacccaccgaatgtgcaaatacacacaatcgacggctcttcaggagttgctaatccagcaatggatccaatttatgatgagccgacgacgactactagcgtgcctttgtaagcacaagaaagtgagtacgaacttatgtactcattcgtttcggaagaaacaggtacgttaatagttaatagcgtacttctttttcttgctttcgtggtattcttgctagtcacactagccatccttactgcgcttcgattgtgtgcgtactgctgcaatattgttaacgtgagtttagtaaaaccaacggtttacgtctactcgcgtgttaaaaatctgaactcttctgaaggagttcctgatcttctggtctaaacgaactaactattattattattctgtttggaactttaacattgcttatcatggcagacaacggtactattaccgttgagaagcttaaacaactcctggaacaatggaacctagtaataggtttcctattcctagcctggattatgttactacaatttgcctattctaatcggaacaggtttttgtacataataaagcttgttttcctctggctcttgtggccagtaacacttgcttgttttgtgcttgctgctgtctacagaattaattgggtgactggcgggattgcgattgcaatggcttgtattgtaggcttgatgtggcttagctacttcgttgcttccttcaggctgtttgctcgtacccgctcaatgtggtcattcaacccagaaacaaacattcttctcaatgtgcctctccgggggacaattgtgaccagaccgctcatggaaagtgaacttgtcattggtgctgtgatcattcgtggtcacttgcgaatggccggacactccctagggcgctgtgacattaaggacctgccaaaagagatcactgtggctacatcacgaacgctttcttattacaaattaggagcgtcgcagcgtgtaggcactgattcaggttttgctgcatacaaccgctaccgtattggaaactataaattaaatacagaccacgccggtagcaacgacaatattgctttgctagtacagtaagtgacaacagatgtttcatcttgttgacttccaggttacaatagcagagatattgattatcattatgaggactttcaggattgctatttggaatcttgacgttataataagttcaatagtgagacaattatttaagcctctaactaagaagaattattcggagttagatgatgaagaacctatggagttagattatccataaaacgaacatgaaaattattctcttcctgacattgattgtatttacatcttgcgagctatatcactatcaggagtgtgttagaggtacgactgtactactaaaagaaccttgcccatcaggaacatacgagggcaattcaccatttcaccctcttgctgacaataaatttgcactaacttgcactagcacacactttgcttttgcttgtgctgacggtactcgacatacctatcagctgcgtgcaagatcagtttcaccaaaacttttcatcagacaagaggaggttcaacaagagctctactcgccactttttctcattgttgctgctctagtatttttaatactttgcttcaccattaagagaaagacagaatgaatgagctcactttaattgacttctatttgtgctttttagcctttctgctattccttgttttaataatgcttattatattttggttttcactcgaaatccaggatctagaagaaccttgtaccaaagtctaaacgaacatgaaacttctcattgttttgacttgtatttctctatgcagttgcatatgcactgtagtacagcgctgtgcatctaataaacctcatgtgcttgaagatccttgtaaggtacaacactaggggtaatacttatagcactgcttggctttgtgctctaggaaaggttttaccttttcatagatggcacactatggttcaaacatgcacacctaatgttactatcaactgtcaagatccagctggtggtgcgcttatagctaggtgttggtaccttcatgaaggtcaccaaactgctgcatttagagacgtacttgttgttttaaataaacgaacaaattaaaatgtctgataatggaccccaatcaaaccaacgtagtgccccccgcattacatttggtggacccacagattcaactgacaataaccagaatggaggacgcaatggggcaaggccaaaacagcgccgaccccaaggtttacccaataatactgcgtcttggttcacagctctcactcagcatggcaaggaggaacttagattccctcgaggccagggcgttccaatcaacaccaatagtggtccagatgaccaaattggctactaccgaagagctacccgacgagttcgtggtggtgacggcaaaatgaaagagctcagccccagatggtacttctattacctaggaactggcccagaagcttcacttccctacggcgctaacaaagaaggcatcgtatgggttgcaactgagggagccttgaatacacccaaagaccacattggcacccgcaatcctaataacaatgctgccaccgtgctacaacttcctcaaggaacaacattgccaaaaggcttctacgcagagggaagcagaggcggcagtcaagcctcttctcgctcctcatcacgtagtcgcggtaattcaagaaattcaactcctggcagcagtaggggaaattctcctgctcgaatggctagcggaggtggtgaaactgccctcgcgctattgctgctagacagattgaaccagcttgagagcaaagtttctggtaaaggccaacaacaacaaggccaaactgtcactaagaaatctgctgctgaggcatctaaaaagcctcgccaaaaacgtactgccacaaaacagtacaacgtcactcaagcatttgggagacgtggtccagaacaaacccaaggaaatttcggggaccaagacctaatcagacaaggaactgattacaaacattggccgcaaattgcacaatttgctccaagtgcctctgcattctttggaatgtcacgcattggcatggaagtcacaccttcgggaacatggctgacttatcatggagccattaaattggatgacaaagatccacaattcaaagacaacgtcatactgctgaacaagcacattgacgcatacaaaacattcccaccaacagagcctaaaaaggacaaaaagaaaaagactgatgaagctcagcctttgccgcagagacaaaagaagcagcccactgtgactcttcttcctgcggctgacatggatgatttctccagacaacttcaaaattccatgagtggagcttctgctgattcaactcaggcataaacactcatgatgaccacacaaggcagatgggctatgtaaacgttttcgcaattccgtttacgatacatagtctactcttgtgcagaatgaattctcgtaactaaacagcacaagtaggtttagttaactttaatctcacatagcaatctttaatcaatgtgtaacattagggaggacttgaaagagccaccacattttcatcgaggccacgcggagtacgatcgagggtacagtgaataatgctagggagagctgcctatatggaagagccctaatgtgtaaaattaattttagtagtgctatccccatgtgattttaatagcttcttaggagaatgac

SEQ ID NO: 29760 - DNA, 29715 bp, SARS Coronavirus
cctacccaggaaaagccaaccaacctcgatctcttgtagatctgttctctaaacgaactttaaaatctgtgtagctgtcgctcggctgcatgcctagtgcacctacgcagtataaacaataataaattttactgtcgttgacaagaaacgagtaactcgtccctcttctgcagactgcttacggtttcgtccgtgttgcagtcgatcatcagcatacctaggtttcgtccgggtgtgaccgaaaggtaagatggagagccttgttcttggtgtcaacgagaaaacacacgtccaactcagtttgcctgtccttcaggttagagacgtgctagtgcgtggcttcggggactctgtggaagaggccctatcggaggcacgtgaacacctcaaaaatggcacttgtggtctagtagagctggaaaaaggcgtactgccccagcttgaacagccctatgtgtgcattaaacgttctgatgcctaaagcacctatcacggccacaaggtcgttgagctggttgcagaaatggacggcattcagtacggtcgtagcggtataacactgggagtactcgtgccacatgtgggcgaaaccccaattgcataccgcaatgttcttcttcgtaagaacggtaataagggagccggtggtcatagctatggcatcgatctaaagtcttatgacttaggtgacgagcttggcactgatcccattgaagattatgaacaaaactggaacactaagcatggcagtggtgcactccgtgaactcactcgtgagctcaatggaggtgcagtcactcgctatgtcgacaacaatttctgtggcccagatgggtaccctcttgattgcatcaaagattttctcgcacgcgcgggcaagtcaatgtgcactctttccgaacaacttgattacatcgagtcgaagagaggtgtctactgctgccgtgaccatgagcatgaaattgcctggttcactgagcgctctgataagagctacgagcaccagacacccttcgaaattaagagtgccaagaaatttgacactttcaaaggggaatgcccaaagtttgtgtttcctcttaactcaaaagtcaaagtcattcaaccacgtgttgaaaagaaaaagactgagggtttcatggggcgtatacgctctgtgtaccctgttgcatctccacaggagtgtaacaatatgcacttgtctaccttgatgaaatgtaatcattgcgatgaagtttcatggcagacgtgcgactttctgaaagccacttgtgaacattgtggcactgaaaatttagttattgaaggacctactacatgtgggtacctacctactaatgctgtagtgaaaatgccatgtcctgcctgtmaagacccagagattggacctgagcatagtgttgcagattatcacaaccactcaaacattgaaactcgactccgcaagggaggtaggactagatgttttggaggctgtgtgtttgcctatgttggctgctataataagcgtgcctactgggttcctcgtgctagtgctgatattggctcaggccatactggcattactggtgacaatgtggagaccttgaatgaggatctccttgagatactgagtcgtgaacgtgttaacattaacattgttggcgattttcatttgaatgaagaggttgccatcattttggcatctttctctgcttctacaagtgcctttattgacactataaagagtcttgattacaagtctttcaaaaccattgttgagtcctgcggtaactataaagttaccaagggaaagcccgtaaaaggtgcttggaacattggacaacagagatcagttttaacaccactgtgtggttttccctcacaggctgctggtgttatcagatcaatttttgcgcgcacacttgatgcagcaaaccactcaattcctgatttgcaaagagcagctgtcaccatacttgatggtatttctgaacagtcattacgtcttgtcgacgccatggtttatacttcagacctgctcaccaacagtgtcattattatggcatatgtaactggtggtcttgtacaacagacttctcagtggttgtctaatcttttgggcactactgttgaaaaactcaggcctatctttgaatggattgaggcgaaacttagtgcaggagttgaatttctcaaggatgcttgggagattctcaaatttctcattacaggtgtttttgacatcgtcaagggtcaaatacaggttgcttcagataacatcaaggattgtgtaaaatgcttcattgatgttgttaacaaggcactcgaaatgtgcattgatcaagtcactatcgctggcgcaaagttgcgatcactcaacttaggtgaagtcttcatcgctcaaagcaagggactttaccgtcagtgtatacgtggcaaggagcagctgcaactactcatgcctcttaaggcaccaaaagaagtaacctttcttgaaggtgattcacatgacacagtacttacctctgaggaggttgttctcaagaacggtgaactcgaagcactcgagacgcccgttgatagcttcacaaatggagctatcgttggcacaccagtctgtgtaaatggcctcatgctcttagagattaaggacaaagaacaatactgcgcattgtctcctggtttactggctacaaacaatgtctttcgcttaaaagggggtgcaccaattaaaggtgtaacctttggagaagatactgtttgggaagttcaaggttacaagaatgtgagaatcacatttgagcttgatgaacgtgttgacaaagtgcttaatgaaaagtgctctgtctacactgttgaatccggtaccgaagttactgagtttgcatgtgttgtagcagaggctgttgtgaagactttacaaccagtttctgatctccttaccaacatgggtattgatcttgatgagtggagtgtagctacattctacttatttgatgatgctggtgaagaaaacttttcatcacgtatgtattgttccttttaccctccagatgaggaagaagaggacgatgcagagtgtgaggaagaagaaattgatgaaacctgtgaacatgagtacggtacagaggatgattatcaaggtctccctctggaatttggtgcctcagctgaaacagttcgagttgaggaagaagaagaggaagactggctggatgatactactgagcaatcagagattgagccagaaccagaacctacacctgaagaaccagttaatcagtttactggttatttaaaacttactgacaatgttgccattaaatgtgttgacatcgttaaggaggcacaaagtgctaatcctatggtgattgtaaatgctgctaacatacacctgaaacatggtggtggtgtagcaggtgcactcaacaaggcaaccaatggtgccatgcaaaaggagagtgatgattacattaagctaaatggccctcttacagtaggagggtcttgtttgctttctggacataatcttgctaagaagtgtctgcatgttgttggacctaacctaaatgcaggtgaggacatccagcttcttaaggcagcatatgaaaatttcaattcacaggacatcttacttgcaccattgttgtcagcaggcatatttggtgctaaaccacttcagtctttacaagtgtgcgtgcagacggttcgtacacaggtttatattgcagtcaatgacaaagctctttatgagcaggttgtcatggattatcttgataacctgaagcctagagtggaagcacctaaacaagaggagccaccaaacacagaagattccaaaactgaggagaaatctgtcgtacagaagcctgtcgatgtgaagccaaaaattaaggcctgcattgatgaggttaccacaacactggaagaaactaagtttcttaccaataagttactcttgtttgctgatatcaatggtaagctttaccatgattctcagaacatgcttagaggtgaagatatgtctttccttgagaaggatgcaccttacatggtaggtgatgttatcactagtggtgatatcacttgtgttgtaataccctccaaaaaggctggtggcactactgagatgctctcaagagctttgaagaaagtgccagttgatgagtatataaccacgtaccctggacaaggatgtgctggttatacacttgaggaagctaagactgctcttaagaaatgcaaatctgcattttatgtactaccttcagaagcacctaatgctaaggaagagattctaggaactgtatcctggaatttgagagaaatgcttgctcatgctgaagagacaagaaaattaatgcctatatgcatggatgttagagccataatggcaaccatccaacgtaagtataaaggaattaaaattcaagagggcatcgttgactatggtgtccgattcttcttttatactagtaaagagcctgtagcttctattattacgaagctgaactctctaaatgagccgcttgtcacaatgccaattggttatgtgacacatggttttaatcttgaagaggctgcgcgctgtatgcgttctcttaaagctcctgccgtagtgtcagtatcatcaccagatgctgttactacatataatggatacctcacttcgtcatcaaagacatctgaggagcactttgtagaaacagtttctttggctggctcttacagagattggtcctattcaggacagcgtacagagttaggtgttgaatttcttaagcgtggtgacaaaattgtgtaccacactctggagagccccgtcgagtttcatcttgacggtgaggttctttcacttgacaaactaaagagtctcttatccctgcgggaggttaagactataaaagtgttcacaactgtggacaacactaatctccacacacagcttgtggatatgtctatgacatatggacagcagtttggtccaacatacttggatggtgctgatgttacaaaaattaaacctcatgtaaatcatgagggtaagactttctttgtactacctagtgatgacacactacgtagtgaagctttcgagtactaccatactcttgatgagagttttcttggtaggtacatgtctgctttaaaccacacaaagaaatggaaatttcctcaagttggtggtttaacttcaattaaatgggctgataacaattgttatttgtctagtgttttattagcacttcaacagcttgaagtcaaattcaatgcaccagcacttcaagaggcttattatagagcccgtgctggtgatgctgctaacttttgtgcactcatactcgcttacagtaataaaactgttggcgagcttggtgatgtcagagaaactatgacccatcttctacagcatgctaatttggaatctgcaaagcgagttcttaatgtggtgtgtaaacattgtggtcagaaaactactaccttaacgggtgtagaagctgtgatgtatatgggtactctatcttatgataatcttaagacaggtgtttccattccatgtgtgtgtggtcgtgatgctacacaatatctagtacaacaagagtcttcttttgttatgatgtctgcaccacctgctgagtataaattacagcaaggtacattcttatgtgcgaatgagtacactggtaactatcagtgtggtcattacactcatataactgctaaggagaccctctatcgtattgacggagctcaccttacaaagatgtcagagtacaaaggaccagtgactgatgttttctacaaggaaacatcttacactacaaccatcaagcctgtgtcgtataaactcgatggagttacttacacagagattgaaccaaaattggatgggtattataaaaaggataatgcttactatacagagcagcctatagaccttgtaccaactcaaccattaccaaatgcgagttttgataatttcaaactcacatgttctaacacaaaatttgctgatgatttaaatcaaatgacaggcttcacaaagccagcttcacgagagctatctgtcacattcttcccagacttgaatggcgatgtagtggctattgactatagacactattcagcgagtttcaagaaaggtgctaaattactgcataagccaattgtttggcacattaaccaggctacaaccaagacaacgttcaaaccaaacacttggtgtttacgttgtctttggagtacaaagccagtagatacttcaaattcatttgaagttctggcagtagaagacacacaaggaatggacaatcttgcttgtgaaagtcaacaacccacctctgaagaagtagtggaaaatcctaccatacagaaggaagtcatagagtgtgacgtgaaaactaccgaagttgtaggcaatgtcatacttaaaccatcagatgaaggtgttaaagtaacacaagagttaggtcatgaggatcttatggctgcttatgtggaaaacacaagcattaccattaagaaacctaatgagctttcactagccttaggtttaaaaacaattgccactcatggtattgctgcaattaatagtgttccttggagtaaaattttggcttatgtcaaaccattcttaggacaagcagcaattacaacatcaaattgcgctaagagattagcacaacgtgtgtttaacaattatatgccttatgtgtttacattattgttccaattgtgtacttttactaaaagtaccaattctagaattagagcttcactacctacaactattgctaaaaatagtgttaagagtgttgctaaattatgtttggatgccggcattaattatgtgaagtcacccaaattttctaaattgttcacaatcgctatgtggctattgttgttaagtatttgcttaggttctctaatctgtgtaactgctgcttttggtgtactcttatctaattttggtgctccttcttattgtaatggcgttagagaattgtatcttaattcgtctaacgttactactatggatttctgtgaaggttcttttccttgcagcatttgtttaagtggattagactcccttgattcttatccagctcttgaaaccattcaggtgacgatttcatcgtacaagctagacttgacaattttaggtctggccgctgagtgggttttggcatatatgttgttcacaaaattcttttatttattaggtctttcagctataatgcaggtgttctttggctattttgctagtcatttcatcagcaattcttggctcatgtggtttatcattagtattgtacaaatggcacccgtttctgcaatggttaggatgtacatcttctttgcttctttctactacatatggaagagctatgttcatatcatggatggttgcacctcttcgacttgcatgatgtgctataagcgcaatcgtgccacacgcgttgagtgtacaactattgttaatggcatgaagagatctttctatgtctatgcaaatggaggccgtggcttctgcaagactcacaattggaattgtctcaattgtgacacattttgcactggtagtacattcattagtgatgaagttgctcgtgatttgtcactccagtttaaaagaccaatcaaccatactgaccagtcatcgtatatagttgatagtgttgctgtgaaaaatggcgcgcttcacatctactttgacaaggctggtcaaaagacatatgagagacatccgctctcccattttgtcaatttagacaatttgagagctaacaacactaaaggttcactgcctattaatgtcatagtttttgatggcaagtccaaatgcgacgagtctgcttctaagtctgcttctgtgtactacagtcagctgatgtgccaacctattctgttgcttgaccaagctcttgtatcagacgttggagatagtactgaagtttccgttaagatgtttgatgcttatgtcgacaccttttcagcaacttttagtgttcctatggaaaaacttaaggcacttgttgctacagctcacagcgagttagcaaagggtgtagctttagatggtgtcctttctacattcgtgtcagctgcccgacaaggtgttgttgataccgatgttgacacaaaggatgttattgaatgtctcaaactttcacatcactctgacttagaagtgacaggtgacagttgtaacaatttcatgctcacctataataaggttgaaaacatgacgcccagagatcttggcgcatgtattgactgtaatgcaaggcatatcaatgcccaagtagcaaaaagtcacaatgtttcactcatctggaatgtaaaagactacatgtctttatctgaacagctgcgtaaacaaattcgtagtgctgccaagaagaacaacataccttttagactaacttgtgctacaactagacaggttgtcaatgtcataactactaaaatctcactcaagggtggtaagattgttagtacttgttttaaacttatgcttaaggccacattattgtgcgttcttgctgcattggtttgttatatacgttatgccagtacatacattgtcaatccatgatggttacacaaatgaaatcattggttacaaagccattcaggatggtgtcactcgtgacatcatttctactgatgattgttttgcaaataaacatgctggttttgacgcatggtttagccagcgtggtggttcatacaaaaatgacaaaagctgccctgtagtagctgctatcattacaagagagattggtttcatagtgcctggcttaccgggtactgtgctgagagcaatcaatggtgacttcttgcattttctacctcgtgtttttagtgctgttggcaacatttgctacacaccttccaaactcattgagtatagtgattttgctacctctgcttgcgttcttgctgctgagtgtacaatttttaaggatgctatgggcaaacctgtgccatattgttatgacactaatttgctagagggttctatttcttatagtgagcttcgtccagacactcgttatgtgcttatggatggttccatcatacagtttcctaacacttacctggagggttctgttagagtagtaacaacttttgatgctgagtactgtagacatggtacatgcgaaaggtcagaagtaggtatttgcctatctaccagtggtagatgggttcttaataatgagcattacagagctctatcaggagttttctgtggtgttgatgcgatgaatctcatagctaacatctttactcctcttgtgcaacctgtgggtgctttagatgtgtctgctctagtagtggctggtggtattattgccatattggtgacttgtgctgcctactactttatgaaattcagacgtgtttttggtgagtacaaccatgttgttgctgctaatgcacttttgtttttgatgtctttcactatactctgtctggtaccagcttacagctttctgccgggagtctactcagtcttttacttgtacttgacattctatttcaccaatgatgtttcattcttggctcaccttcaatggtttgccatgttttctcctattgtgcctttttggataacagcaatctatgtattctgtatttctctgaagcactgccattggttctttaacaactatcttaggaaaagagtcatgtttaatggagttacatttagtaccttcgaggaggctgctttgtgtacctttttgctcaacaaggaaatgtacctaaaattgcgtagcgagacactgttgccacttacacagtataacaggtatcttgctctatataacaagtacaagtatttcagtggagccttagatactaccagctatcgtgaagcagcttgctgccacttagcaaaggctctaaatgactttagcaactcaggtgctgatgttctctaccaaccaccacagacatcaatcacttctgctgttctgcagagtggttttaggaaaatggcattcccgtcaggcaaagttgaagggtgcatggtacaagtaacctgtggaactacaactcttaatggattgtggttggatgacacagtatactgtccaagacatgtcatttgcacagcagaagacatgcttaatcctaactatgaagatctgctcattcgcaaatccaaccatagctttcttgttcaggctggcaatgttcaacttcgtgttattggccattctatgcaaaattgtctgcttaggcttaaagttgatacttctaaccctaagacacccaagtataaatttgtccgtatccaacctggtcaaacattttcagttctagcatgctacaatggttcaccatctggtgtttatcagtgtgccatgagacctaatcataccattaaaggttctttccttaatggatcatgtggtagtgttggttttaacattgattatgattgcgtgtctttctgctatatgcatcatatggagcttccaacaggagtacacgctggtactgacttagaaggtaaattctatggtccatttgttgacagacaaactgcacaggctgcaggtacagacacaaccataacattaaatgttttggcatggctgtatgctgctgttatcaatggtgataggtggtttcttaatagattcaccactactttgaatgactttaaccttgtggcaatgaagtacaactatgaacctttgacacaagatcatgttgacatattgggacctctttctgctcaaacaggaattgccgtcttagatatgtgtgctgctttgaaagagctgctgcagaatggtatgaatggtcgtactatccttggtagcactattttagaagatgagtttacaccatttgatgttgttagacaatgctctggtgttaccttccaaggtaagttcaagaaaattgttaagggcactcatcattggatgcttttaactttcttgacatcactattgattcttgttcaaagtacacagtggtcactgtttttctttgtttacgagaatgctttcttgccatttactcttggtattatggcaattgctgcatgtgctatgctgcttgttaagcataagcacgcattcttgtgcttgtttctgttaccttctcttgcaacagttgcttactttaatatggtctacatgcctgctagctgggtgatgcgtatcatgacatggcttgaattggctgacactagcttgtctggttataggcttaaggattgtgttatgtatgcttcagctttagttttgcttattctcatgacagctcgcactgtttatgatgatgctgctagacgtgtttggacactgatgaatgtcattacacttgtttacaaagtctactatggtaatgctttagatcaagctatttccatgtgggccttagttatttctgtaacctctaactattctggtgtcgttacgactatcatgtttttagctagagctatagtgtttgtgtgtgttgagtataacccattgttatttattactggcaacaccttacagtgtatcatgcttgtttattgtttcttaggctattgttgctgctgctactttggccttttctgtttactcaaccgttacttcaggcttactcttggtgtttatgactacttggtctctacacaagaatttaggtatatgaactcccaggggcttttgcctcctaagagtagtattgatgctttcaagcttaacattaagttgttgggtattggaggtaaaccatgtatcaaggttgctactgtacagtctaaaatgtctgacgtaaagtgcacatctgtggtactgctctcggttcttcaacaacttagagtagagtcatcttctaaattgtgggcacaatgtgtacaactccacaatgatattcttcttgcaaaagacacaactgaagctttcgagaagatggtttctcttttgtctgttttgctatccatgcagggtgctgtagacattaataggttgtgcgaggaaatgctcgataaccgtgctactcttcaggctattgcttcagaatttagttctttaccatcatatgccgcttatgccactgcccaggaggcctatgagcaggctgtagctaatggtgattctgaagtcgttctcaaaaagttaaagaaatctttgaatgtggctaaatctgagtttgaccgtgatgctgccatgcaacgcaagttggaaaagatggcagatcaggctatgacccaaatgtacaaacaggcaagatctgaggacaagagggcaaaagtaactagtgctatgcaaacaatgctcttcactatgcttaggaagcttgataatgatgcacttaacaacattatcaacaatgcgcgtgatggttgtgttccactcaacatcataccattgactacagcagccaaactcatggttgttgtccctgattatggtacctacaagaacacttgtgatggtaacacctttacatatgcatctgcactctgggaaatccagcaagttgttgatgcggatagcaagcatgttcaacttagtgaaattaacatggacaattcaccaaatttggcttggcctcttattgttacagctctaagagccaactcagctgttaaactacagaataatgaactgagtccagtagcactacgacagatgtcctgtgcggctggtaccacacaaacagcttgtactgatgacaatgcacttgcctactataacaattcgaagggaggtaggtttgtgctggcattactatcagaccaccaagatctcaaatgggctagattccctaagagtgatggtacaggtacaatttacacagaactggaaccaccttgtaggtttgttacagacacaccaaaagggcctaaagtgaaatacttgtacttcatcaaaggcttaaacaacctaaatagaggtatggtgctgggcagtttagctgctacagtacgtcttcaggctggaaatgctacagaagtacctgcccattcagactgtgatttccttctgtgcttttgcagtagaccctggtcaagcatataaggattacctagcaagtggaggacaaccaatcaccaactgtgtgaagatgttgtgtacacacactggtacaggacaggcaattactgtaacaccagaagctaacatggaccaagagtcctttggtggtgcttcatgttgtctgtattgtagatgccacattgaccatccaaatcctaaaggattctgtgacttgaaaggtaagtacgtccaaatacctaccacttgtgctaatgacccagtgggttttacacttagaaacacagtctgtaccgtctgcggaatgtggaaaggttatggctgtagttgtgaccaactccgcgaacccttgatgcagtctgcggatgcatctaacgtttttaaacgggtttgcggtgtaagtgcagcccgtcttacaccgtgcggcacaggcactagtactgatgtctgtctacagggcattttgatatttacaacgaaaaagttgctggttttgcaaagttcctaaaaactaattgctgtcgcttccaggagaaggatgaggaaggcaatttattagactcttactttgtagttaagaggcatactatgtctaactaccaacatgaagagactatttataacttggttaaagattgtccagcggttgctgtccatgactttttcaagtttagagtagatggtgacatggtaccacatatatcacgtcagcgtctaactaaatacacaatggctgatttagtctatgctctacgtcattttgatgagggtaattgtgatacattaaaagaaatactcgtcacatacaattgctgtgatgatgattatttcaataagaaggattggtatgacttcgtagagaatcctgacatcttacgcgtatatgctaacttaggtgagcgtgtacgccaatcattattaaagactgtacaattctgcgatgctatgcgtgatgcaggcattgtaggcgtactgacattagataatcaggatcttaatgggaactggtacgatttcggtgatttcgaacaagtagcaccaggctgcggagttcctattgtggattcatattactcattgctgatgcccatcctcactttgactagggcattggctgctgagtcccatatggatgctgatctcgcaaaaccacttattaagtgggatttgctgaaatatgattttacggaagagagactttgtctcttcgaccgttattttaaatattgggaccagacataccatcccaattgtattaactgtttggatgataggtgtatccttcattgtgcaaactttaatgtgttattttctactgtgtttccacctacaagttttggaccactagtaagaaaaatatttgtagatggtgttccttttgttgtttcaactggataccattttcgtgagttaggagtcgtacataatcaggatgtaaacttacatagctcgcgtctcagtttcaaggaacttttagtgtatgctgctgatccagctatgcatgcagcttctggcaatttattgctagataaacgcactacatgcttttcagtagctgcactaacaaacaatgttgcttttcaaactgtcaaacccggtaattttaataaagacttttatgactttgctgtgtctaaaggtttctttaaggaaggaagttctgttgaactaaaacacttcttctttgctcaggatggcaacgctgctatcagtgattatgactattatcgttataatctgccaacaatgtgtgatatcagacaactcctattcgtagttgaagttgttgataaatactttgattgttacgatggtggctgtattaatgccaaccaagtaatcgttaacaatctggataaatcagctggtttcccatttaataaatggggtaaggctagactttattatgactcaatgagttatgaggatcaagatgcacttttcgcgtatactaagcgtaatgtcatccctactataactctaatgaatcttaagtatgccattagtgcaaagaatagagctcgcaccgtagctggtgtctctatctgtagtactatgacaaatagacagtttcatcagaaattattgaagtcaatagccgccactagaggagctactgtggtaattggaacaagcaagttttacggtggctggcataatatgttaaaaactgtttacagtgatgtagaaactccacaccttatgggttgggattatccaaaatgtgacagagccatgcctaacatgcttaggataatggcctctcttgttcttgctcgcaaacataacacttgctgtaacttatcacaccgtttctacaggttagctaacgagtgtgcgcaagtattaagtgagatggtcatgtgtggcggctcactatatgttaaaccaggtggaacatcatccggtgatgctacaactgcttatgctaatagtgtctttaacatttgtcaagctgttacagccaatgtaaatgcacttctttcaactgatggtaataagatagctgacaagtatgtccgcatctacaacacaggctctatgagtgtctctatatgaaatagggatgttgatcatgaattcgtggatgagttttacgcttacctgcgtaaacatttctccatgatgattctttctgatgatgccgttgtgtgctataacagtaactatgcggctcaaggtttagtagctagcattaagaactttaaggcagttctttattatcaaaataatgtgttcatgtctgaggcaaaatgttggactgagactgaccttactaaaggacctcacgaattttgctcacagcatacaatgctagttaaacaaggagatgattacgtgtacctgccttacccagatccatcaagaatattaggcgcaggctgttttgtcgatgatattgtcaaaacagatggtacacttatgattgaaaggttcgtgtcactggctattgatgcttacccacttacaaaacatcctaatcaggagtatgctgatgtctttcacttgtatttacaatacattagaaagttacatgatgagcttactggccacatgttggacatgtattccgtaatgctaactaatgataacacctcacggtactgggaacctgagttttatgaggctatgtacacaccacatacagtcttgcaggctgtaggtgcttgtgtattgtgcaattcacagacttcacttcgttgcggtgcctgtattaggagaccattcctatgttgcaagtgctgctatgaccatgtcatttcaacatcacacaaattagtgttgtctgttaatccctatgtttgcaatgccccaggttgtgatgtcactgatgtgacacaactgtatctaggaggtatgagctattattgcaagtcacataagcctcccattagttttccattatgtgctaatggtcaggtttttggtttatacaaaaacacatgtgtaggcagtgacaatgtcactgacttcaatgcgatagcaacatgtgattggactaatgctggcgattacatacttgccaacacttgtactgagagactcaagcttttcgcagcagaaacgctcaaagccactgaggaaacatttaagctgtcatatggtattgccactgtacgcgaagtactctctgacagagaattgcatctttcatgggaggttggaaaacctagaccaccattgaacagaaactatgtctttactggttaccgtgtaactaaaaatagtaaagtacagattggagagtacacctttgaaaaaggtgactatggtgatgctgttgtgtacagaggtactacgacatacaagttgaatgttggtgattactttgtgttgacatctcacactgtaatgccacttagtgcacctactctagtgccacaagagcactatgtgagaattactggcttgtacccaacactcaacatctcagatgagttttctagcaatgttgcaaattatcaaaaggtcggcatgcaaaagtactctacactccaaggaccacctggtactggtaagagtcattttgccatcggacttgctctctattacccatctgctcgcatagtgtatacggcatgctctcatgcagctgttgatgccctatgtgaaaaggcattaaaatatttgcccatagataaatgtagtagaatcatacctgcgcgtgcgcgcgtagagtgttttgataaattcaaagtgaattcaacactagaacagtatgttttctgcactgtaaatgcattgccagaaacaactgctgacattgtagtctttgatgaaatctctatggctactaattatgacttgagtgttgtcaatgctagacttcgtgcaaaacactacgtctatattggcgatcctgctcaattaccagccccccgcacattgctgactaaaggcacactagaaccagaatattttaattcagtgtgcagacttatgaaaacaataggtccagacatgttccttggaacttgtcgctgttgtcctgctgaaattgttgacactgtgagtgctttagtatatgacaataagctaaaagcacacaaggataagtcagctcaatgcttcaaaatgttctacaaaggtgttattacacatgatgtttcatctgcaatcaacagacctcaaataggcgttgtaagagaatttcttacacgcaatcctgcttggagaaaagctgtttttatctcaccttataattcacagaacgctgtagcttcaaaaatcttaggattgcctacgcagactgttgattcatcacagggttctgaatatgactatgtcatattcacacaaactactgaaacagcacactcttgtaatgtcaaccgcttcaatgtggctatcacaagggcaaaaattggcattttgtgcataatgtctgatagagatctttatgacaaactgcaatttacaagtctagaaataccacgtcgcaatgtggctacattacaagcagaaaatgtaactggactttttaaggactgtagtaagatcattactggtcttcatcctacacaggcacctacacacctcagcgttgatataaagttcaagactgaaggattatgtgttgacataccaggcataccaaaggacatgacctaccgtagactcatctctatgatgggtttcaaaatgaattaccaagtcaatggttaccctaatatgtttatcacccgcgaagaagctattcgtcacgttcgtgcgtggattggctttgatgtagagggctgtcatgcaactagagatgctgtgggtactaacctacctctccagctaggattttctacaggtgttaacttagtagctgtaccgactggttatgttgacactgaaaataacacagaattcaccagagttaatgcaaaacctccaccaggtgaccagtttaaacatcttataccactcatgtataaaggcttgccctggaatgtagtgcgtattaagatagtacaaatgctcagtgatacactgaaaggattgtcagacagagtcgtgttcgtcctttgggcgcatggctttgagcttacatcaatgaagtactttgtcaagattggacctgaaagaacgtgttgtctgtgtgacaaacgtgcaacttgcttttctacttcatcagatacttatgcctgctggaatcattctgtgggttttgactatgtctataacccatttatgattgatgttcagcagtggggctttacgggtaaccttcagagtaaccatgaccaacattgccaggtacatggaaatgcacatgtggctagttgtgatgctatcatgactagatgtttagcagtccatgagtgctttgttaagcgcgttgattggtctgttgaataccctattataggagatgaactgagggttaattctgcttgcagaaaagtacaacacatggttgtgaagtctgcattgcttgctgataagtttccagttcttcatgacattggaaatccaaaggctatcaagtgtgtgcctcaggctgaagtagaatggaagttctacgatgctcagccatgtagtgacaaagcttacaaaatagaggaactcttctattcttatgctacacatcacgataaattcactgatggtgtttgtttgttttggaattgtaacgttgatcgttacccagccaatgcaattgtgtgtaggtttgacacaagagtcttgtcaaacttgaacttaccaggctgtgatggtggtagtttgtatgtgaataagcatgcattccacactccagctttcgataaaagtgcatttactaatttaaagcaattgcctttcttttactattctgatagtccttgtgagtctcatggcaaacaagtagtgtcggatattgattatgttccactcaaatctgctacgtgtattacacgatgcaatttaggtggtgctgtttgcagacaccatgcaaatgagtaccgacagtacttggatgcatataatatgatgatttctgctggatttagcctatggatttacaaacaatttgatacttataacctgtggaatacatttaccaggttacagagtttagaaaatgtggcttataatgttgttaataaaggacactttgatggacacgccggcgaagcacctgtttccatcattaataatgctgtttacacaaaggtagatggtattgatgtggagatctttgaaaataagacaacacttcctgttaatgttgcatttgagctttgggctaagcgtaacattaaaccagtgccagagattaagatactcaataatttgggtgttgatatcgctgctaatactgtaatctgggactacaaaagagaagccccagcacatgtatctacaataggtgtctgcacaatgactgacattgccaagaaacctactgagagtgcttgttcttcacttactgtcttgtttgatggtagagtggaaggacaggtagacctttttagaaacgcccgtaatggtgttttaataacagaaggttcagtcaaaggtctaacaccttcaaagggaccagcacaagctagcgtcaatggagtcacattaattggagaatcagtaaaaacacagtttaactactttaagaaagtagacggcattattcaacagttgcctgaaacctactttactcagagcagagacttagaggattttaagcccagatcacaaatggaaactgactttctcgagctcgctatggatgaattcatacagcgatataagctcgagggctatgccttcgaacacatcgtttatggagatttcagtcatggacaacttggcggtcttcatttaatgataggcttagccaagcgctcacaagattcaccacttaaattagaggattttatccctatggacagcacagtgaaaaattacttcataacagatgcgcaaacaggttcatcaaaatgtgtgtgttctgtgattgatcttttacttgatgactttgtcgagataataaagtcacaagatttgtcagtgatttcaaaagtggtcaaggttacaattgactatgctgaaatttcattcatgctttggtgtaaggatggacatgttgaaaccttctacccaaaactacaagcaagtcaagcgtggcaaccaggtgttgcgatgcctaacttgtacaagatgcaaagaatgcttcttgaaaagtgtgaccttcagaattatggtgaaaatgctgttataccaaaaggaataatgatgaatgtcgcaaagtatactcaactgtgtcaatacttaaatacacttactttagctgtaccctacaacatgagagttattcactttggtgctggctctgataaaggagttgcaccaggtacagctgtgctcagacaatggttgccaactggcacactacttgtcgattcagatcttaatgacttcgtctccgacgcagattctactttaattggagactgtgcaacagtacatacggctaataaatgggaccttattattagcgatatgtatgaccctaggaccaaacatgtgacaaaagagaatgactctaaagaagggtttttcacttatctgtgtggatttataaagcaaaaactagccctgggtggttctatagctgtaaagataacagagcattcttggaatgctgacctttacaagcttatgggccatttctcatggtggacagcttttgttacaaatgtaaatgcatcatcatcggaagcatttttaattggggctaactatcttggcaagccgaaggaacaaattgatggctataccatgcatgctaactacattttctggaggaacacaaatcctatccagttgtcttcctattcactctttgacatgagcaaatttcctcttaaattaagaggaactgctgtaatgtctcttaaggagaatcaaatcaatgatatgatttattctcttctggaaaaaggtaggcttatcattagagaaaacaacagagttgtggtttcaagtgatattcttgttaacaactaaacgaacatgtttattttcttattatttcttactctcactagtggtagtgaccttgaccggtgcaccacttttgatgatgttcaagctcctaattacactcaacatacttcatctatgaggggggtttactatcctgatgaaatttttagatcagacactctttatttaactcaggatttatttcttccattttattctaatgttacagggtttcatactattaatcatacgtttggcaaccctgtcataccttttaaggatggtatttattttgctgccacagagaaatcaaatgttgtccgtggttgggtttttggttctaccatgaacaacaagtcacagtcggtgattattattaacaattctactaatgttgttatacgagcatgtaactttgaattgtgtgacaaccctttctttgctgtttctaaacccatgggtacacagacacatactatgatattcgataatgcatttaattgcactttcgagtacatatctgatgccttttcgcttgatgtttcagaaaagtcaggtaattttaaacacttacgagagtttgtgtttaaaaataaagatgggtttctctatgtttataagggctatcaacctatagatgtagttcgtgatctaccttctggttttaacactttgaaacctatttttaagttgcctcttggtattaacattacaaattttagagccattcttacagccttttcacctgctcaagacatttggggcacgtcagctgcagcctattttgttggctatttaaagccaactacatttatgctcaagtatgatgaaaatggtacaatcacagatgctgttgattgttctcaaaatccacttgctgaactcaaatgctctgttaagagctttgagattgacaaaggaatttaccagacctctaatttcagggttgttccctcaggagatgttgtgagattccctaatattacaaacttgtgtccttttggagaggtttttaatgctactaaattcccttctgtctatgcatgggagagaaaaaaaatttctaattgtgttgctgattactctgtgctctacaactcaacatttttttcaacctttaagtgttatggcgtttctgccactaagttgaatgatctttgcttctccaatgtctatgcagattcttttgtagtcaagggagatgatgtaagacaaatagcgccaggacaaactggtgttattgctgattataattataaattgccagatgatttcatgggttgtgtccttgcttggaatactaggaacattgatgctacttcaactggtaattataattataaatataggtatcttagacatggcaagcttaggccctttgagagagacatatctaatgtgcctttctcccctgatggcaaaccttgcaccccacctgctcttaattgttattggccattaaatgattatggtttttacaccactactggcattggctaccaaccttacagagttgtagtactttcttttgaacttttaaatgcaccggccacggtttgtggaccaaaattatccactgaccttattaagaaccagtgtgtcaattttaattttaatggactcactggtactggtgtgttaactccttcttcaaagagatttcaaccatttcaacaatttggccgtgatgtttctgatttcactgattccgttcgagatcctaaaacatctgaaatattagacatttcaccttgctcttttgggggtgtaagtgtaattacacctggaacaaatgcttcatctgaagttgctgttctatatcaagatgttaactgcactgatgtttctacagcaattcatgcagatcaactcacaccagcttggcgcatatattctactggaaacaatgtattccagactcaagcaggctgtcttataggagctgagcatgtcgacacttcttatgagtgcgacattcctattggagctggcatttgtgctagttaccatacagtttctttattacgtagtactagccaaaaatctattgtggcttatactatgtctttaggtgctgatagttcaattgcttactctaataacaccattgctatacctactaacttttcaattagcattactacagaagtaatgcctgtttctatggctaaaacctccgtagattgtaatatgtacatctgcggagattctactgaatgtgctaatttgcttctccaatatggtagcttttgcacacaactaaatcgtgcactctcaggtattgctgctgaacaggatcgcaacacacgtgaagtgttcgctcaagtcaaacaaatgtacaaaaccccaactttgaaatattttggtggttttaatttttcacaaatattacctgaccctctaaagccaactaagaggtcttttattgaggacttgctctttaataaggtgacactcgctgatgctggcttcatgaagcaatatggcgaatgcctaggtgatattaatgctagagatctcatttgtgcgcagaagttcaatggacttacagtgttgccacctctgctcactgatgatatgattgctgcctacactgctgctctagttagtggtactgccactgctggatggacatttggtgctggcgctgctcttcaaataccttttgctatgcaaatggcatataggttcaatggcattggagttacccaaaatgttctctatgagaaccaaaaacaaatcgccaaccaatttaacaaggcgattagtcaaattcaagaatcacttacaacaacatcaactgcattgggcaagctgcaagacgttgttaaccagaatgctcaagcattaaacacacttgttaaacaacttagctctaattttggtgcaatttcaagtgtgctaaatgatatcctttcgcgacttgataaagtcgaggcggaggtacaaattgacaggttaattacaggcagacttcaaagccttcaaacctatgtaacacaacaactaatcagggctgctgaaatcagggcttctgctaatcttgctgctactaaaatgtctgagtgtgttcttggacaatcaaaaagagttgacttttgtggaaagggctaccaccttatgtccttcccacaagcagccccgcatggtgttgtcttcctacatgtcacgtatgtgccatcccaggagaggaacttcaccacagcgccagcaatttgtcatgaaggcaaagcatacttccctcgtgaaggtgtttttgtgtttaatggcacttcttggtttattacacagaggaacttcttttctccacaaataattactacagacaatacatttgtctcaggaaattgtgatgtcgttattggcatcattaacaacacagtttatgatcctctgcaacctgagcttgactcattcaaagaagagctggacaagtacttcaaaaatcatacatcaccagatgttgatcttggcgacatttcaggcattaacgcttctgtcgtcaacattcaaaaagaaattgaccgcctcaatgaggtcgctaaaaatttaaatgaatcactcattgaccttcaagaattgggaaaatatgagcaatatattaaatggccttggtatgtttggctcggcttcattgctggactaattgccatcgtcatggttacaatcttgctttgttgcatgactagttgttgcagttgcctcaagggtgcatgctcttgtggttcttgctgcaagtttgatgaggatgactctgagccagttctcaagggtgtcaaattacattacacataaacgaacttatggatttgtttatgagattttttactcttggatcaattactgcacagccagtaaaaattgacaatgcttctcctgcaagtactgttcatgctacagcaacgataccgctacaagcctcactccctttcggatggcttgttattggcgttgcatttcttgctgtttttcagagcgctaccaaaataattgcgctcaataaaagatggcagctagccctttataagggcttccagttcatttgcaatttactgctgctatttgttaccatctattcacatcttttgcttgtcgctgcaggtatggaggcgcaatttttgtacctctatgccttgatatattttctacaatgcatcaacgcatgtagaattattatgagatgttggctttgttggaagtgcaaatccaagaacccattactttatgatgccaactactttgtttgctggcacacacataactatgactactgtataccatataacagtgtcacagatacaattgtcgttactgaaggtgacggcatttcaacaccaaaactcaaagaagactaccaaattggtggttattctgaggataggcactcaggtgttaaagactatgtcgttgtacatggctatttcaccgaagtttactaccagcttgagtctacacaaattactacagacactggtattgaaaatgctacattcttcatctttaacaagcttgttaaagacccaccgaatgtgcaaatacacacaatcgacggctcttcaggagttgctaatccagcaatggatccaatttatgatgagccgacgacgactactagcgtgcctttgtaagcacaagaaagtgagtacgaacttatgtactcattcgtttcggaagaaacaggtacgttaatagttaatagcgtacttctttttcttgctttcgtggtattcttgctagtcacactagccatccttactgcgcttcgattgtgtgcgtactgctgcaatattgttaacgtgagtttagtaaaaccaacggtttacgtctactcgcgtgttaaaaatctgaactcttctgaaggagttcctgatcttctggtctaaacgaactaactattattattattctgtttggaactttaacattgcttatcatggcagacaacggtactattaccgttgaggagcttaaacaactcctggaacaatggaacctagtaataggtttcctattcctagcctggattatgttactacaatttgcctattctaatcggaacaggtttttgtacataataaagcttgttttcctctggctcttgtggccagtaacacttgcttgttttgtgcttgctgctgtctacagaattaattgggtgactggcgggattgcgattgcaatggcttgtattgtaggcttgatgtggcttagctacttcgttgcttccttcaggctgtttgctcgtacccgctcaatgtggtcattcaacccagaaacaaacattcttctcaatgtgcctctccgggggacaattgtgaccagaccgctcatggaaagtgaacttgtcattggtgctgtgatcattcgtggtcacttgcgaatggccggacactccctagggcgctgtgacattaaggacctgccaaaagagatcactgtggctacatcacgaacgctttcttattacaaattaggagcgtcgcagcgtgtaggcactgattcaggttttgctgcatacaaccgctaccgtattggaaactataaattaaatacagaccacgccggtagcaacgacaatattgctttgctagtacagtaagtgacaacagatgtttcatcttgttgacttccaggttacaatagcagagatattgattatcattatgaggactttcaggattgctatttggaatcttgacgttataataagttcaatagtgagacaattatttaagcctctaactaagaagaattattcggagttagatgatgaagaacctatggagttagattatccataaaacgaacatgaaaattattctcttcctgacattgattgtatttacatcttgcgagctatatcactatcaggagtgtgttagaggtacgactgtactactaaaagaaccttgcccatcaggaacatacgagggcaattcaccatttcaccctcttgctgacaataaatttgcactaacttgcactagcacacactttgcttttgcttgtgctgacggtactcgacatacctatcagctgcgtgcaagatcagtttcaccaaaacttttcatcagacaagaggaggttcaacaagagctctactcgccactttttctcattgttgctgctctagtatttttaatactttgcttcaccattaagagaaagacagaatgaatgagctcactttaattgacttctatttgtgctttttagcctttctgctattccttgttttaataatgcttattatattttggttttcactcgaaatccagagatctagaagaaccttgtaccaaagtctaaacgaacatgaaacttctcattgttttgacttgtatttctctatgcagttgcatatgcactgtagtacagcgctgtgcatctaataaacctcatgtgcttgaagatccttgtaaggtacaacactaggggtaatacttatagcactgcttggctttgtgctctaggaaaggttttaccttttcatagatggcacactatggttcaaacatgcacacctaatgttactatcaactgtcaagatccagctggtggtgcgcttatagctaggtgttggtaccttcatgaaggtcaccaaactgctgcatttagagacgtacttgttgttttaaataaacgaacaaattaaaatgtctgataatggaccccaatcaaaccaacgtagtgccccccgcattacatttggtggacccacagattcaactgacaataaccagaatggaggacgcaatggggcaaggccaaaacagcgccgaccccaaggtttacccaataatactgcgtcttggttcacagctctcactcagcatggcaaggaggaacttagattccctcgaggccagggcgttccaatcaacaccaatagtggtccagatgaccaaattggctactaccgaagagctacccgacgagttcgtggtggtgacggcaaaatgaaagagctcagccccagatggtacttctattacctaggaactggcccgaagcttcacttccctacggcgctaacaaagaaggcatcgtatgggttgcaactgagggagcctgaaatacacccaaagaccacattggcacccgcaatcctaataacaatgctgccaccgtgctacaacttcctcaaggaacaacattgccaaaaggcttctacgcagagggaagcagaggcggcagtcaagcctcttctcgctcctcatcacgtagtcgcggtaattcaagaaattcaactcctggcagcagtaggggaaattctcctgctcgaatggctagcggaggtggtgaaactgccctcgcgctattgctgctagacagattgaaccagcttgagagcaaagtttctggtaaaggccaacaacaacaaggccaaactgtcactaagaaatctgctgctgaggcatctaaaaagcctcgccaaaaacgtactgccacaaaacagtacaacgtcactcaagcatttgggagacgtggtccagaacaaacccaaggaaatttcggggaccaagacctaatcagacaaggaactgattacaaacattggccgcaaattgcacaatttgctccaagtgcctctgcattctttggaatgtcacgcattggcatggaagtcacaccttcgggaacatggctgacttatcatggagccattaaattggatgacaaagatccacaattcaaagacaacgtcatactgctgaacaagcacattgacgcatacaaaacattcccaccaacagagcctaaaaaggacaaaaagaaaaagactgatgaagctcagcctttgccgcagagacaaaagaagcagcccactgtgactcttcttcctgcggctgacatggatgatttctccagacaacttcaaaattccatgagtggagcttctgctgattcaactcaggcataaacactcatgatgaccacacaaggcagatgggctatgtaaacgttttcgcaattccgtttacgatacatagtctactcttgtgcagaatgaattctcgtaactaaacagcacaagtaggtttagttaactttaatctcacatagcaatctttaatcaatgtgtaacattagggaggacttgaaagagccaccacattttcatcgaggccacgcggagtacgatcgagggtacagtgaataatgctagggagagctgcctatatggaagagccctaatgtgtaaaattaattttagtagtgctatccccatgtgattttaatagcttcttaggagaat

SEQ ID NO: 29761 - DNA, 368 bp, SARS Coronavirus
ctaacatgcttaggataatggcctctcttgttcttgctcgcaaacataacacttgctgtaacttatcacaccgtttctacaggttagctaacgagtgtgcgcaagtattaagtgagatggtcatgtgtggcggctcactatatgttaaaccaggtggaacatcatccggtgatgctacaactgcttatgctaatagtgtctttaacatttgtcaagctgttacagccaatgtaaatgcacttctttcaactgatggtaataagatagctgacaagtatgtccgcaatctacaacacaggctctatgagtgtctctatagaaatagggatgttgatcatgaattcgtggatgagttttacgcttacctg

SEQ ID NO: 29762 - DNA, 29729 bp, SARS Coronavirus
atattaggtttttacctacccaggaaaagccaaccaacctcgatctcttgtagatctgttctctaaacgaactttaaaatctgtgtagctgtcgctcggctgcatgcctagtgcacctacgcagtataaacaataataaattttactgtcgttgacaagaaacgagtaactcgtccctcttctgcagactgcttacggtttcgtccgtgttgcagtcgatcatcagcatacctaggtttcgtccgggtgtgaccgaaaggtaagatggagagccttgttcttggtgtcaacgagaaaacacacgtccaactcagtttgcctgtccttcaggttagagacgtgctagtgcgtggcttcggggactctgtggaagaggccctatcggaggcacgtgaacacctcaaaaatggcacttgtggtctagtagagctggaaaaaggcgtactgccccagcttgaacagccctatgtgttcattaaacgttctgatgccttaagcaccaatcacggccacaaggtcgttgagctggttgcagaaatggacggcattcagtacggtcgtagcggtataacactgggagtactcgtgccacatgtgggcgaaaccccaattgcataccgcaatgttcttcttcgtaagaacggtaataagggagccggtggtcatagctatggcatcgatctaaagtcttatgacttaggtgacgagcttggcactgatcccattgaagattatgaacaaaactggaacactaagcatggcagtggtgcactccgtgaactcactcgtgagctcaatggaggtgcagtcactcgctatgtcgacaacaatttctgtggcccagatgggtaccctcttgattgcatcaaagattttctcgcacgcgcgggcaagtcaatgtgcactctttccgaacaacttgattacatcgagtcgaagagaggtgtctactgctgccgtgaccatgagcatgaaattgcctggttcactgagcgctctgataagagctacgagcaccagacacccttcgaaattaagagtgccaagaaatttgacactttcaaaggggaatgcccaaagtttgtgtttcctcttaactcaaaagtcaaagtcattcaaccacgtgttgaaaagaaaaagactgagggtttcatggggcgtatacgctctgtgtaccctgttgcatctccacaggagtgtaacaatatgcacttgtctaccttgatgaaatgtaatcattgcgatgaagtttcatggcagacgtgcgactttctgaaagccacttgtgaacattgtggcactgaaaatttagttattgaaggacctactacatgtgggtacctacctactaatgctgtagtgaaaatgccatgtcctgcctgtcaagacccagagattggacctgagcatagtgttgcagattatcacaaccactcaaacattgaaactcgactccgcaagggaggtaggactagatgttttggaggctgtgtgtttgcctatgttggctgctataataagcgtgcctactgggttcctcgtgctagtgctgatattggctcaggccatactggcattactggtgacaatgtggagaccttgaatgaggatctccttgagatactgagtcgtgaacgtgttaacattaacattgttggcgattttcatttgaatgaagaggttgccatcattttggcatctttctctgcttctacaagtgcctttattgacactataaagagtcttgattacaagtctttcaaaaccattgttgagtcctgcggtaactataaagttaccaagggaaagcccgtaaaaggtgcttggaacattggacaacagagatcagttttaacaccactgtgtggttttccctcacaggctgctggtgttatcagatcaatttttgcgcgcacacttgatgcagcaaaccactcaattcctgatttgcaaagagcagctgtcaccatacttgatggtatttctgaacagtcattacgtcttgtcgacgccatggtttatacttcagacctgctcaccaacagtgtcattattatggcatatgtaactggtggtcttgtacaacagacttctcagtggttgtctaatcttttgggcactactgttgaaaaactcaggcctatctttgaatggattgaggcgaaacttagtgcaggagttgaatttctcaaggatgcttgggagattctcaaatttctcattacaggtgtttttgacatcgtcaagggtcaaatacaggttgcttcagataacatcaaggattgtgtaaaatgcttcattgatgttgttaacaaggcactcgaaatgtgcattgatcaagtcactatcgctggcgcaaagttgcgatcactcaacttaggtgaagtcttcatcgctcaaagcaagggactttaccgtcagtgtatacgtggcaaggagcagctgcaactactcatgcctcttaaggcaccaaaagaagtaacctttcttgaaggtgattcacatgacacagtacttacctctgaggaggttgttctcaagaacggtgaactcgaagcactcgagacgcccgttgatagcttcacaaatggagctatcgttggcacaccagtctgtgtaaatggcctcatgctcttagagattaaggacaaagaacaatactgcgcattgtctcctggtttactggctacaaacaatgtctttcgcttaaaagggggtgcaccaattaaaggtgtaacctttggagaagatactgtttgggaagttcaaggttacaagaatgtgagaatcacatttgagcttgatgaacgtgttgacaaagtgcttaatgaaaagtgctctgtctacactgttgaatccggtaccgaagttactgagtttgcatgtgttgtagcagaggctgttgtgaagactttacaaccagtttctgatctccttaccaacatgggtattgatcttgatgagtggagtgtagctacattctacttatttgatgatgctggtgaagaaaacttttcatcacgtatgtattgttccttttaccctccagatgaggaagaagaggacgatgcagagtgtgaggaagaagaaattgatgaaacctgtgaacatgagtacggtacagaggatgattatcaaggtctccctctggaatttggtgcctcggctgaaacagttcgagttgaggaagaagaagaggaagactggctggatgatactactgagcaatcagagattgagccagaaccagaacctacacctgaagaaccagttaatcagtttactggttatttaaaacttactgacaatgttgccattaaatgtgttgacatcgttaaggaggcacaaagtgctaatcctatggtgattgtaaatgctgctaacatacacctgaaacatggtggtggtgtagcaggtgcactcaacaaggcaaccaatggtgccatgcaaaaggagagtgatgattacattaagctaaatggccctcttacagtaggagggtcttgtttgctttctggacataatcttgctaagaagtgtctgcatgttgttggacctaacctaaatgcaggtgaggacatccagcttcttaaggcagcatatgaaaatttcaattcacaggacatcttacttgcaccattgttgtcagcaggcatatttggtgctaaaccacttcagtctttacaagtgtgcgtgcagacggttcgtacacaggtttatattgcagtcaatgacaaagctctttatgagcaggttgtcatggattatcttgataacctgaagcctagagtggaagcacctaaacaagaggagccaccaaacacagaagattccaaaactgaggagaaatctgtcgtacagaagcctgtcgatgtgaagccaaaaattaaggcctgcattgatgaggttaccacaacactggaagaaactaagtttcttaccaataagttactcttgtttgctgatatcaatggtaagctttaccatgattctcagaacatgcttagaggtgaagatatgtctttccttgagaaggatgcaccttacatggtaggtgatgttatcactagtggtgatatcacttgtgttgtaataccctccaaaaaggctggtggcactactgagatgctctcaagagctttgaagaaagtgccagttgatgagtatataaccacgtaccctggacaaggatgtgctggttatacacttgaggaagctaagactgctcttaagaaatgcaaatctgcattttatgtactaccttcagaagcacctaatgctaaggaagagattctaggaactgtatcctggaatttgagagaaatgcttgctcatgctgaagagacaagaaaattaatgcctatatgcatggatgttagagccataatggcaaccatccaacgtaagtataaaggaattaaaattcaagagggcatcgttgactatggtgtccgattcttcttttatactagtaaagagcctgtagcttctattattacgaagctgaactctctaaatgagccgcttgtcacaatgccaattggttatgtgacacatggttttaatcttgaagaggctgcgcgctgtatgcgttctcttaaagctcctgccgtagtgtcagtatcatcaccagatgctgttactacatataatggatacctcacttcgtcatcaaagacatctgaggagcactttgtagaaacagtttctttggctggctcttacagagattggtcctattcaggacagcgtacagagttaggtgttgaatttcttaagcgtggtgacaaaattgtgtaccacactctggagagccccgtcgagtttcatcttgacggtgaggttctttcacttgacaaactaaagagtctcttatccctgcgggaggttaagactataaaagtgttcacaactgtggacaacactaatctccacacacagcttgtggatatgtctatgacatatggacagcagtttggtccaacatacttggatggtgctgatgttacaaaaattaaacctcatgtaaatcatgagggtaagactttctttgtactacctagtgatgacacactacgtagtgaagctttcgagtactaccatactcttgatgagagttttcttggtaggtacatgtctgctttaaaccacacaaagaaatggaaatttcctcaagttggtggtttaacttcaattaaatgggctgataacaattgttatttgtctagtgttttattagcacttcaacagcttgaagtcaaattcaatgcaccagcacttcaagaggcttattatagagcccgtgctggtgatgctgctaacttttgtgcactcatactcgcttacagtaataaaactgttggcgagcttggtgatgtcagagaaactatgacccatcttctacagcatgctaatttggaatctgcaaagcgagttcttaatgtggtgtgtaaacattgtggtcagaaaactactaccttaacgggtgtagaagctgtgatgtatatgggtactctatcttatgataatcttaagacaggtgtttccattccatgtgtgtgtggtcgtgatgctacacaatatctagtacaacaagagtcttcttttgttatgatgtctgcaccacctgctgagtataaattacagcaaggtacattcttatgtgcgaatgagtacactggtaactatcagtgtggtcattacactcatataactgctaaggagaccctctatcgtattgacggagctcaccttacaaagatgtcagagtacaaaggaccagtgactgatgttttctacaaggaaacatcttacactacaaccatcaagcctgtgtcgtataaactcgatggagttacttacacagagattgaaccaaaattggatgggtattataaaaaggataatgcttactatacagagcagcctatagaccttgtaccaactcaaccattaccaaatgcgagttttgataatttcaaactcacatgttctaacacaaaatttgctgatgatttaaatcaaatgacaggcttcacaaagccagcttcacgagagctatctgtcacattcttcccagacttgaatggcgatgtagtggctattgactatagacactattcagcgagtttcaagaaaggtgctaaattactgcataagccaattgtttggcacattaaccaggctacaaccaagacaacgttcaaaccaaacacttggtgtttacgttgtctttggagtacaaagccagtagatacttcaaattcatttgaagttctggcagtagaagacacacaaggaatggacaatcttgcttgtgaaagtcaacaacccacctctgaagaagtagtggaaaatcctaccatacagaaggaagtcatagagtgtgacgtgaaaactaccgaagttgtaggcaatgtcatacttaaaccatcagatgaaggtgttaaagtaacacaagagttaggtcatgaggatcttatggctgcttatgtggaaaacacaagcattaccattaagaaacctaatgagctttcactagccttaggtttaaaaacaattgccactcatggtattgctgcaattaatagtgttccttggagtaaaattttggcttatgtcaaaccattcttaggacaagcagcaattacaacatcaaattgcgctaagagattagcacaacgtgtgtttaacaattatatgccttatgtgtttacattattgttccaattgtgtacttttactaaaagtaccaattctagaattagagcttcactacctacaactattgctaaaaatagtgttaagagtgttgctaaattatgtttggatgccggcattaattatgtgaagtcacccaaattttctaaattgttcacaatcgctatgtggctattgttgttaagtatttgcttaggttctctaatctgtgtaactgctgcttttggtgtactcttatctaattttggtgctccttcttattgtaatggcgttagagaattgtatcttaattcgtctaacgttactactatggatttctgtgaaggttcttttccttgcagcatttgtttaagtggattagactcccttgattcttatccagctcttgaaaccattcaggtgacgatttcatcgtacaagctagacttgacaattttaggtctggccgctgagtgggttttggcatatatgttgttcacaaaattcttttatttattaggtctttcagctataatgcaggtgttctttggctattttgctagtcatttcatcagcaattcttggctcatgtggtttatcattagtattgtacaaatggcacccgtttctgcaatggttaggatgtacatcttctttgcttctttctactacatatggaagagctatgttcatatcatggatggttgcacctcttcgacttgcatgatgtgctataagcgcaatcgtgccacacgcgttgagtgtacaactattgttaatggcatgaagagatctttctatgtctatgcaaatggaggccgtggcttctgcaagactcacaattggaattgtctcaattgtgacacattttgcactggtagtacattcattagtgatgaagttgctcgtgatttgtcactccagtttaaaagaccaatcaaccctactgaccagtcatcgtatattgttgatagtgttgctgtgaaaaatggcgcgcttcacctctactttgacaaggctggtcaaaagacctatgagagacatccgctctcccattttgtcaatttagacaatttgagagctaacaacactaaaggttcactgcctattaatgtcatagtttttgatggcaagtccaaatgcgacgagtctgcttctaagtctgcttctgtgtactacagtcagctgatgtgccaacctattctgttgcttgaccaagctcttgtatcagacgttggagatagtactgaagtttccgttaagatgtttgatgcttatgtcgacaccttttcagcaacttttagtgttcctatggaaaaacttaaggcacttgttgctacagctcacagcgagttagcaaagggtgtagctttagatggtgtcctttctacattcgtgtcagctgcccgacaaggtgttgttgataccgatgttgacacaaaggatgttattgaatgtctcaaactttcacatcactctgacttagaagtgacaggtgacagttgtaacaatttcatgctcacctataataaggttgaaaacatgacgcccagagatcttggcgcatgtattgactgtaatgcaaggcatatcaatgcccaagtagcaaaaagtcacaatgtttcactcatctggaatgtaaaagactacatgtctttatctgaacagctgcgtaaacaaattcgtagtgctgccaagaagaacaacataccttttagactaacttgtgctacaactagacaggttgtcaatgtcataactactaaaatctcactcaagggtggtaagattgttagtacttgttttaaacttatgcttaaggccacattattgtgcgttcttgctgcattggtttgttatatcgttatgccagtacatacattgtcaatccatgatggttacacaaatgaaatcattggttacaaagccattcaggatggtgtcactcgtgacatcatttctactgatgattgttttgcaaataaacatgctggttttgacgcatggtttagccagcgtggtggttcatacaaaaatgacaaaagctgccctgtagtagctgctatcattacaagagagattggtttcatagtgcctggcttaccgggtactgtgctgagagcaatcaatggtgacttcttgcattttctacctcgtgtttttagtgctgttggcaacatttgctacacaccttccaaactcattgagtatagtgattttgctacctctgcttgcgttcttgctgctgagtgtacaatttttaaggatgctatgggcaaacctgtgccatattgttatgacactaatttgctagagggttctatttcttatagtgagcttcgtccagacactcgttatgtgcttatggatggttccatcatacagtttcctaacacttacctggagggttctgttagagtagtaacaacttttgatgctgagtactgtagacatggtacatgcgaaaggtcagaagtaggtatttgcctatctaccagtggtagatgggttcttaataatgagcattacagagctctatcaggagttttctgtggtgttgatgcgatgaatctcatagctaacatctttactcctcttgtgcaacctgtgggtgctttagatgtgtctgcttcagtagtggctggtggtattattgccatattggtgacttgtgctgcctactactttatgaaattcagacgtgtttttggtgagtacaaccatgttgttgctgctaatgcacttttgtttttgatgtctttcactatactctgtctggtaccagcttacagctttctgccgggagtctactcagtcttttacttgtacttgacattctatttcaccaatgatgtttcattcttggctcaccttcaatggtttgccatgttttctcctattgtgcctttttggataacagcaatctatgtattctgtatttctctgaagcactgccattggttctttaacaactatcttaggaaaagagtcatgtttaatggagttacatttagtaccttcgaggaggctgctttgtgtacctttttgctcaacaaggaaatgtacctaaaattgcgtagcgagacactgttgccacttacacagtataacaggtatcttgctctatataacaagtacaagtatttcagtggagccttagatactaccagctatcgtgaagcagcttgctgccacttagcaaaggctctaaatgactttagcaactcaggtgctgatgttctctaccaaccaccacagacatcaatcacttctgctgttctgcagagtggttttaggaaaatggcattcccgtcaggcaaagttgaagggtgcatggtacaagtaacctgtggaactacaactcttaatggattgtggttggatgacacagtatactgtccaagacatgtcatttgcacagcagaagacatgcttaatcctaactatgaagatctgctcattcgcaaatccaaccatagctttcttgttcaggctggcaatgttcaacttcgtgttattggccattctatgcaaaattgtctgcttaggcttaaagttgatacttctaaccctaagacacccaagtataaatttgtccgtatccaacctggtcaaacattttcagttctagcatgctacaatggttcaccatctggtgtttatcagtgtgccatgagacctaatcataccattaaaggttctttccttaatggatcatgtggtagtgttggttttaacattgattatgattgcgtgtctttctgctatatgcatcatatggagcttccaacaggagtacacgctggtactgacttagaaggtaaattctatggtccatttgttgacagacaaactgcacaggctgcaggtacagacacaaccataacattaaatgttttggcatggctgtatgctgctgttatcaatggtgataggtggtttcttaatagattcaccactactttgaatgactttaaccttgtggcaatgaagtacaactatgaacctttgacacaagatcatgttgacatattgggacctctttctgctcaaacaggaattgccgtcttagatatgtgtgctgctttgaaagagctgctgcagaatggtatgaatggtcgtactatccttggtagcactattttagaagatgagtttacaccatttgatgttgttagacaatgctctggtgttaccttccaaggtaagttcaagaaaattgttaagggcactcatcattggatgcttttaactttcttgacatcactattgattcttgttcaaagtacacagtggtcactgtttttctttgtttacgagaatgctttcttgccatttactcttggtattatggcaattgctgcatgtgctatgctgcttgttaagcataagcacgcattcttgtgcttgtttctgttaccttctcttgcaacagttgcttactttaatatggtctacatgcctgctagctgggtgatgcgtatcatgacatggcttgaattggctgacactagcttgtctggttataggcttaaggattgtgttatgtatgcttcagctttagttttgcttattctcatgacagctcgcactgtttatgatgatgctgctagacgtgtttggacactgatgaatgtcattacacttgtttacaaagtctactatggtaatgctttagatcaagctatttccatgtgggccttagttatttctgtaacctctaactattctggtgtcgttacgactatcatgtttttagctagagctatagtgtttgtgtgtgttgagtattacccattgttatttattactggcaacaccttacagtgtatcatgcttgtttattgtttcttaggctattgttgctgctgctactttggccttttctgtttactcaaccgttacttcaggcttactcttggtgtttatgactacttggtctctacacaagaatttaggtatatgaactcccaggggcttttgcctcctaagagtagtattgatgctttcaagcttaacattaagttgttgggtattggaggtaaaccatgtatcaaggttgctactgtacagtctaaaatgtctgacgtaaagtgcacatctgtggtactgctctcggttcttcaacaacttagagtagagtcatcttctaaattgtgggcacaatgtgtacaactccacaatgatattcttcttgcaaaagacacaactgaagctttcgagaagatggtttctcttttgtctgttttgctatccatgcagggtgctgtagacattaataggttgtgcgaggaaatgctcgataaccgtgctactcttcaggctattgcttcagaatttagttctttaccatcatatgccgcttatgccactgcccaggaggcctatgagcaggctgtagctaatggtgattctgaagtcgttctcaaaaagttaaagaaatctttgaatgtggctaaatctgagtttgaccgtgatgctgccatgcaacgcaagttggaaaagatggcagatcaggctatgacccaaatgtacaaacaggcaagatctgaggacaagagggcaaaagtaactagtgctatgcaaacaatgctcttcactatgcttaggaagcttgataatgatgcacttaacaacattatcaacaatgcgcgtgatggttgtgttccactcaacatcataccattgactacagcagccaaactcatggttgttgtccctgattatggtacctacaagaacacttgtgatggtaacacctttacatatgcatctgcactctgggaaatccagcaagttgttgatgcggatagcaagattgttcaacttagtgaaattaacatggacaattcaccaaatttggcttggcctcttattgttacagctctaagagccaactcagctgttaaactacagaataatgaactgagtccagtagcactacgacagatgtcctgtgcggctggtaccacacaaacagcttgtactgatgacaatgcacttgcctactataacaattcgaagggaggtaggtttgtgctggcattactatcagaccaccaagatctcaaatgggctagattccctaagagtgatggtacaggtacaatttacacagaactggaaccaccttgtaggtttgttacagacacaccaaaagggcctaaagtgaaatacttgtacttcatcaaaggcttaaacaacctaaatagaggtatggtgctgggcagtttagctgctacagtacgtcttcaggctggaaatgctacagaagtacctgccaattcaactgtgctttccttctgtgcttttgcagtagaccctgctaaagcatataaggattacctagcaagtggaggacaaccaatcaccaactgtgtgaagatgttgtgtacacacactggtacaggacaggcaattactgtaacaccagaagctaacatggaccaagagtcctttggtggtgcttcatgttgtctgtattgtagatgccacattgaccatccaaatcctaaaggattctgtgacttgaaaggtaagtacgtccaaatacctaccacttgtgctaatgacccagtgggttttacacttagaaacacagtctgtaccgtctgcggaatgtggaaaggttatggctgtagttgtgaccaactccgcgaacccttgatgcagtctgcggatgcatcaacgtttttaaacgggtttgcggtgtaagtgcagcccgtcttacaccgtgcggcacaggcactagtactgatgtcgtctacagggcttttgatatttacaacgaaaaagttgctggttttgcaaagttcctaaaaactaattgctgtcgcttccaggagaaggatgaggaaggcaatttattagactcttactttgtagttaagaggcatactatgtctaactaccaacatgaagagactatttataacttggttaaagattgtccagcggttgctgtccatgactttttcaagtttagagtagatggtgacatggtaccacatatatcacgtcagcgtctaactaaatacacaatggctgatttagtctatgctctacgtcattttgatgagggtaattgtgatacattaaaagaaatactcgtcacatacaattgctgtgatgatgattatttcaataagaaggattggtatgacttcgtagagaatcctgacatcttacgcgtatatgctaacttaggtgagcgtgtacgccaatcattattaaagactgtacaattctgcgatgctatgcgtgatgcaggcattgtaggcgtactgacattagataatcaggatcttaatgggaactggtacgatttcggtgatttcgtacaagtagcaccaggctgcggagttcctattgtggattcatattactcattgctgatgcccatcctcactttgactagggcattggctgctgagtcccatatggatgctgatctcgcaaaaccacttattaagtgggatttgctgaaatatgattttacggaagagagactttgtctcttcgaccgttattttaaatattgggaccagacataccatcccaattgtattaactgtttggatgataggtgtatccttcattgtgcaaactttaatgtgttattttctactgtgtttccacctacaagttttggaccactagtaagaaaaatatttgtagatggtgttccttttgttgtttcaactggataccattttcgtgagttaggagtcgtacataatcaggatgtaaacttacatagctcgcgtctcagtttcaaggaacttttagtgtatgctgctgatccagctatgcatgcagcttctggcaatttattgctagataaacgcactacatgcttttcagtagctgcactaacaaacaatgttgcttttcaaactgtcaaacccggtaattttaataaagacttttatgactttgctgtgtctaaaggtttctttaaggaaggaagttctgttgaactaaaacacttcttctttgctcaggatggcaacgctgctatcagtgattatgactattatcgttataatctgccaacaatgtgtgatatcagacaactcctattcgtagttgaagttgttgataaatactttgattgttacgatggtggctgtattaatgccaaccaagtaatcgttaacaatctggataaatcagctggtttcccatttaataaatggggtaaggctagactttattatgactcaatgagttatgaggatcaagatgcacttttcgcgtatactaagcgtaatgtcatccctactataactcaaatgaatcttaagtatgccattagtgcaaagaatagagctcgcaccgtagctggtgtctctatctgtagtactatgacaaatagacagtttcatcagaaattattgaagtcaatagccgccactagaggagctactgtggtaattggaacaagcaagttttacggtggctggcataatatgttaaaaactgtttacagtgatgtagaaactccacaccttatgggttgggattatccaaaatgtgacagagccatgcctaacatgcttaggataatggcctctcttgttcttgctcgcaaacataacacttgctgtaacttatcacaccgtttctacaggttagctaacgagtgtgcgcaagtattaagtgagatggtcatgtgtggcggctcactatatgttaaaccaggtggaacatcatccggtgatgctacaactgcttatgctaatagtgtctttaacatttgtcaagctgttacagccaatgtaaatgcacttctttcaactgatggtaataagatagctgacaagtatgtccgcaatctacaacacaggctctatgagtgtctctatagaaatagggatgttgatcatgaattcgtggatgagttttacgcttacctgcgtaaacatttctccatgatgattctttctgatgatgccgttgtgtgctataacagtaactatgcggctcaaggtttagtagctagcattaagaactttaaggcagttctttattatcaaaataatgtgttcatgtctgaggcaaaatgttggactgagactgaccttactaaaggacctcacgaattttgctcacagcatacaatgctagttaaacaaggagatgattacgtgtacctgccttacccagatccatcaagaatattaggcgcaggctgttttgtcgatgatattgtcaaaacagatggtacacttatgattgaaaggttcgtgtcactggctattgatgcttacccacttacaaaacatcctaatcaggagtatgctgatgtctttcacttgtatttacaatacattagaaagttacatgatgagcttactggccacatgttggacatgtattccgtaatgctaactaatgataacacctcacggtactgggaacctgagttttatgaggctatgtacacaccacatacagtcttgcaggctgtaggtgcttgtgtattgtgcaattcacagacttcacttcgttgcggtgcctgtattaggagaccattcctatgttgcaagtgctgctatgaccatgtcatttcaacatcacacaaattagtgttgtctgttaatccctatgtttgcaatgccccaggttgtgatgtcactgatgtgacacaactgtatctaggaggtatgagctattattgcaagtcacataagcctcccattagttttccattatgtgctaatggtcaggtttttggtttatacaaaaacacatgtgtaggcagtgacaatgtcactgacttcaatgcgatagcaacatgtgattggactaatgctggcgattacatacttgccaacacttgtactgagagactcaagcttttcgcagcagaaacgctcaaagccactgaggaaacatttaagctgtcatatggtattgccactgtacgcgaagtactctctgacagagaattgcatctttcatgggaggttggaaaacctagaccaccattgaacagaaactatgtctttactggttaccgtgtaactaaaaatagtaaagtacagattggagagtacacctttgaaaaaggtgactatggtgatgctgttgtgtacagaggtactacgacatacaagttgaatgttggtgattactttgtgttgacatctcacactgtaatgccacttagtgcacctactctagtgccacaagagcactatgtgagaattactggcttgtacccaacactcaacatctcagatgagttttctagcaatgttgcaaattatcaaaaggtcggcatgcaaaagtactctacactccaaggaccacctggtactggtaagagtcattttgccatcggacttgctctctattacccatctgctcgcatagtgtatacggcatgctctcatgcagctgttgatgccctatgtgaaaaggcattaaaatatttgcccatagataaatgtagtagaatcatacctgcgcgtgcgcgcgtagagtgttttgataaattcaaagtgaattcaacactagaacagtatgttttctgcactgtaaatgcattgccagaaacaactgctgacattgtagtctttgatgaaatctctatggctactaattatgacttgagtgttgtcaatgctagacttcgtgcaaaacactacgtctatattggcgatcctgctcaattaccagccccccgcacattgctgactaaaggcacactagaaccagaatattttaattcagtgtgcagacttatgaaaacaataggtccagacatgttccttggaacttgtcgccgttgtcctgctgaaattgttgacactgtgagtgctttagtttatgacaataagctaaaagcacacaaggataagtcagctcaatgcttcaaaatgttctacaaaggtgttattacacatgatgtttcatctgcaatcaacagacctcaaataggcgttgtaagagaatttcttacacgcaatcctgcttggagaaaagctgtttttatctcaccttataattcacagaacgctgtagcttcaaaaatcttaggattgcctacgcagactgttgattcatcacagggttctgaatatgactatgtcatattcacacaaactactgaaacagcacactcttgtaatgtcaaccgcttcaatgtggctatcacaagggcaaaaattggcattttgtgcataatgtctgatagagatctttatgacaaactgcaatttacaagtctagaaataccacgtcgcaatgtggctacattacaagcagaaaatgtaactggactttttaaggactgtagtaagatcattactggtcttcatcctacacaggcacctacacacctcagcgttgatataaagttcaagactgaaggattatgtgttgacataccaggcataccaaaggacatgacctaccgtagactcatctctatgatgggtttcaaaatgaattaccaagtcaatggttaccctaatatgtttatcacccgcgaagaagctattcgtcacgttcgtgcgtggattggctttgatgtagagggctgtcatgcaactagagatgctgtgggtactaacctacctctccagctaggattttctacaggtgttaacttagtagctgtaccgactggttatgttgacactgaaaataacacagaattcaccagagttaatgcaaaacctccaccaggtgaccagtttaaacatcttataccactcatgtataaaggcttgccctggaatgtagtgcgtattaagatagtacaaatgctcagtgatacactgaaaggattgtcagacagagtcgtgttcgtcctttgggcgcatggctttgagcttacatcaatgaagtactttgtcaagattggacctgaaagaacgtgttgtctgtgtgacaaacgtgcaacttgcttttctacttcatcagatacttatgcctgctggaatcattctgtgggttttgactatgtctataacccatttatgattgatgttcagcagtggggctttacgggtaaccttcagagtaaccatgaccaacattgccaggtacatggaaatgcacatgtggctagttgtgatgctatcatgactagatgtttagcagtccatgagtgctttgttaagcgcgttgattggtctgttgaataccctattataggagatgaactgagggttaattctgcttgcagaaaagtacaacacatggttgtgaagtctgcattgcttgctgataagtttccagttcttcatgacattggaaatccaaaggctatcaagtgtgtgcctcaggctgaagtagaatggaagttctacgatgctcagccatgtagtgacaaagcttacaaaatagaggaactcttctattcttatgctacacatcacgataaattcactgatggtgtttgtttgttttggaattgtaacgttgatcgttacccagccaatgcaattgtgtgtaggtttgacacaagagtcttgtcaaacttgaacttaccaggctgtgatggtggtagtttgtatgtgaataagcatgcattccacactccagctttcgataaaagtgcatttactaatttaaagcaattgcctttcttttactattctgatagtccttgtgagtctcatggcaaacaagtagtgtcggatattgattatgttccactcaaatctgctacgtgtattacacgatgcaatttaggtggtgctgtttgcagacaccatgcaaatgagtaccgacagtacttggatgcatataatatgatgatttctgctggatttagcctatggatttacaaacaatttgatacttataacctgtggaatacatttaccaggttacagagtttagaaaatgtggcttataatgttgttaataaaggacactttgatggacacgccggcgaagcacctgtttccatcattaataatgctgtttacacaaaggtagatggtattgatgtggagatctttgaaaataagacaacacttcctgttaatgttgcatttgagctttgggctaagcgtaacattaaaccagtgccagagattaagatactcaataatttgggtgttgatatcgctgctaatactgtaatctgggactacaaaagagaagccccagcacatgtatctacaataggtgtctgcacaatgactgacattgccaagaaacctactgagagtgcttgttcttcacttactgtcttgtttgatggtagagtggaaggacaggtagacctttttagaaacgcccgtaatggtgttttaataacagaaggttcagtcaaaggtctaacaccttcaaagggaccagcacaagctagcgtcaatggagtcacattaattggagaatcagtaaaaacacagtttaactactttaagaaagtagacggcattattcaacagttgcctgaaacctactttactcagagcagagacttagaggattttaagcccagatcacaaatggaaactgactttctcgagctcgctatggatgaattcatacagcgatataagctcgagggctatgccttcgaacacatcgtttatggagatttcagtcatggacaacttggcggtcttcatttaatgataggcttagccaagcgctcacaagattcaccacttaaattagaggattttatccctatggacagcacagtgaaaaattacttcataacagatgcgcaaacaggttcatcaaaatgtgtgtgttctgtgattgatcttttacttgatgactttgtcgagataataaagtcacaagatttgtcagtgatttcaaaagtggtcaaggttacaattgactatgctgaaatttcattcatgctttggtgtaaggatggacatgttgaaaccttctacccaaaactacaagcaagtcaagcgtggcaaccaggtgttgcgatgcctaacttgtacaagatgcaaagaatgcttcttgaaaagtgtgaccttcagaattatggtgaaaatgctgttataccaaaaggaataatgatgaatgtcgcaaagtatactcaactgtgtcaatacttaaatacacttactttagctgtaccctacaacatgagagttattcactttggtgctggctctgataaaggagttgcaccaggtacagctgtgctcagacaatggttgccaactggcacactacttgtcgattcagatcttaatgacttcgtctccgacgcagattctactttaattggagactgtgcaacagtacatacggctaataaatgggaccttattattagcgatatgtatgaccctaggaccaaacatgtgacaaaagagaatgactctaaagaagggtttttcacttatctgtgtggatttataaagcaaaaactagccctgggtggttctatagctgtaaagataacagagcattcttggaatgctgacctttacaagcttatgggccatttctcatggtggacagcttttgttacaaatgtaaatgcatcatcatcggaagcatttttaattggggctaactatcttggcaagccgaaggaacaaattgatggctataccatgcatgctaactacattttctggaggaacacaaatcctatccagttgtcttcctattcactctttgacatgagcaaatttcctcttaaattaagaggaactgctgtaatgtctcttaaggagaatcaaatcaatgatatgatttattctcttctggaaaaaggtaggcttatcattagagaaaacaacagagttgtggtttcaagtgatattcttgttaacaactaaacgaacatgtttattttcttattatttcttactctcactagtggtagtgaccttgaccggtgcaccacttttgatgatgttcaagctcctaattacactcaacatacttcatctatgaggggggtttactatcctgatgaaatttttagatcagacactctttatttaactcaggatttatttcttccattttattctaatgttacagggtttcatactattaatcatacgtttggcaaccctgtcataccttttaaggatggtatttattttgctgccacagagaaatcaaatgttgtccgtggttgggtttttggttctaccatgaacaacaagtcacagtcggtgattattattaacaattctactaatgttgttatacgagcatgtaactttgaattgtgtgacaaccctttctttgctgtttctaaacccatgggtacacagacacatactatgatattcgataatgcatttaattgcactttcgagtacatatctgatgccttttcgcttgatgtttcagaaaagtcaggtaattttaaacacttacgagagtttgtgtttaaaaataaagatgggtttctctatgtttataagggctatcaacctatagatgtagttcgtgatctaccttctggttttaacactttgaaacctatttttaagttgcctcttggtattaacattacaaattttagagccattcttacagccttttcacctgctcaagacatttggggcacgtcagctgcagcctattttgttggctatttaaagccaactacatttatgctcaagtatgatgaaaatggtacaatcacagatgctgttgattgttctcaaaatccacttgctgaactcaaatgctctgttaagagctttgagattgacaaaggaatttaccagacctctaatttcagggttgttccctcaggagatgttgtgagattccctaatattacaaacttgtgtccttttggagaggtttttaatgctactaaattcccttctgtctatgcatgggagagaaaaaaaatttctaattgtgttgctgattactctgtgctctacaactcaacatttttttcaacctttaagtgctatggcgtttctgccactaagttgaatgatctttgcttctccaatgtctatgcagattcttttgtagtcaagggagatgatgtaagacaaatagcgccaggacaaactggtgttattgctgattataattataaattgccagatgatttcatgggttgtgtccttgcttggaatactaggaacattgatgctacttcaactggtaattataattataaatataggtatcttagacatggcaagcttaggccctttgagagagacatatctaatgtgcctttctcccctgatggcaaaccttgcaccccacctgctcttaattgttattggccattaaatgattatggtttttacaccactactggcattggctaccaaccttacagagttgtagtactttcttttgaacttttaaatgcaccggccacggtttgtggaccaaaattatccactgaccttattaagaaccagtgtgtcaattttaattttaatggactcactggtactggtgtgttaactccttcttcaaagagatttcaaccatttcaacaatttggccgtgatgtttctgatttcactgattccgttcgagatcctaaaacatctgaaatattagacatttcaccttgctcttttgggggtgtaagtgtaattacacctggaacaaatgcttcatctgaagttgctgttctatatcaagatgttaactgcactgatgtttctacagcaattcatgcagatcaactcacaccagcttggcgcatatattctactggaaacaatgtattccagactcaagcaggctgtcttataggagctgagcatgtcgacacttcttatgagtgcgacattcctattggagctggcatttgtgctagttaccatacagtttctttattacgtagtactagccaaaaatctattgtggcttatactatgtctttaggtgctgatagttcaattgcttactctaataacaccattgctatacctactaacttttcaattagcattactacagaagtaatgcctgtttctatggctaaaacctccgtagattgtaatatgtacatctgcggagattctactgaatgtgctaatttgcttctccaatatggtagcttttgcacacaactaaatcgtgcactctcaggtattgctgctgaacaggatcgcaacacacgtgaagtgttcgctcaagtcaaacaaatgtacaaaaccccaactttgaaatattttggtggttttaatttttcacaaatattacctgaccctctaaagccaactaagaggtcttttattgaggacttgctctttaataaggtgacactcgctgatgctggcttcatgaagcaatatggcgaatgcctaggtgatattaatgctagagatctcatttgtgcgcagaagttcaatggacttacagtgttgccacctctgctcactgatgatatgattgctgcctacactgctgctctagttagtggtactgccactgctggatggacatttggtgctggcgctgctcttcaaataccttttgctatgcaaatggcatataggttcaatggcattggagttacccaaaatgttctctatgagaaccaaaaacaaatcgccaaccaatttaacaaggcgattagtcaaattcaagaatcacttacaacaacatcaactgcattgggcaagctgcaagacgttgttaaccagaatgctcaagcattaaacacacttgttaaacaacttagctctaattttggtgcaatttcaagtgtgctaaatgatatcctttcgcgacttgataaagtcgaggcggaggtacaaattgacaggttaattacaggcagacttcaaagccttcaaacctatgtaacacaacaactaatcagggctgctgaaatcagggcttctgctaatcttgctgctactaaaatgtctgagtgtgttcttggacaatcaaaaagagttgacttttgtggaaagggctaccaccttatgtccttcccacaagcagccccgcatggtgttgtcttcctacatgtcacgtatgtgccatcccaggagaggaacttcaccacagcgccagcaatttgtcatgaaggcaaagcatacttccctcgtgaaggtgtttttgtgtttaatggcacttcttggtttattacacagaggaacttcttttctccacaaataattactacagacaatacatttgtctcaggaaattgtgatgtcgttattggcatcattaacaacacagtttatgatcctctgcaacctgagcttgactcattcaaagaagagctggacaagtacttcaaaaatcatacatcaccagatgttgatcttggcgacatttcaggcattaacgcttctgtcgtcaacattcaaaaagaaattgaccgcctcaatgaggtcgctaaaaatttaaatgaatcactcattgaccttcaagaattgggaaaatatgagcaatatattaaatggccttggtatgtttggctcggcttcattgctggactaattgccatcgtcatggttacaatcttgctttgttgcatgactagttgttgcagttgcctcaagggtgcatgctcttgtggttcttgctgcaagtttgatgaggatgactctgagccagttctcaagggtgtcaaattacattacacataaacgaacttatggatttgtttatgagattttttactcttggatcaattactgcacagccagtaaaaattgacaatgcttctcctgcaagtactgttcatgctacagcaacgataccgctacaagcctcactccctttcggatggcttgttattggcgttgcatttcttgctgtttttcagagcgctaccaaaataattgcgctcaataaaagatggcagctagccctttataagggcttccagttcatttgcaatttactgctgctatttgttaccatctattcacatcttttgcttgtcgctgcaggtatggaggcgcaatttttgtacctctatgccttgatatattttctacaatgcatcaacgcatgtagaattattatgagatgttggctttgttggaagtgcaaatccaagaacccattactttatgatgccaactactttgtttgctggcacacacataactatgactactgtataccatataacagtgtcacagatacaattgtcgttactgaaggtgacggcatttcaacaccaaaactcaaagaagactaccaaattggtggttattctgaggataggcactcaggtgttaaagactatgtcgttgtacatggctatttcaccgaagtttactaccagcttgagtctacacaaattactacagacactggtattgaaaatgctacattcttcatctttaacaagcttgttaaagacccaccgaatgtgcaaatacacacaatcgacggctcttcaggagttgctaatccagcaatggatccaatttatgatgagccgacgacgactactagcgtgcctttgtaagcacaagaaagtgagtacgaacttatgtactcattcgtttcggaagaaacaggtacgttaatagttaatagcgtacttctttttcttgctttcgtggtattcttgctagtcacactagccatccttactgcgcttcgattgtgtgcgtactgctgcaatattgttaacgtgagtttagtaaaaccaacggtttacgtctactcgcgtgttaaaaatctgaactcttctgaaggagttcctgatcttctggtctaaacgaactaactattattattattctgtttggaactttaacattgcttatcatggcagacaacggtactattaccgttgaggagcttaaacaactcctggaacaatggaacctagtaataggtttcctattcctagcctggattatgttactacaatttgcctattctaatcggaacaggtttttgtacataataaagcttgttttcctctggctcttgtggccagtaacacttgcttgttttgtgcttgctgctgtctacagaattaattgggtgactggcgggattgcgattgcaatggcttgtattgtaggcttgatgtggcttagctacttcgttgcttccttcaggctgtttgctcgtacccgctcaatgtggtcattcaacccagaaacaaacattcttctcaatgtgcctctccgggggacaattgtgaccagaccgctcatggaaagtgaacttgtcattggtgctgtgatcattcgtggtcacttgcgaatggccggacactccctagggcgctgtgacattaaggacctgccaaaagagatcactgtggctacatcacgaacgctttcttattacaaattaggagcgtcgcagcgtgtaggcactgattcaggttttgctgcatacaaccgctaccgtattggaaactataaattaaatacagaccacgccggtagcaacgacaatattgctttgctagtacagtaagtgacaacagatgtttcatcttgttgacttccaggttacaatagcagagatattgattatcattatgaggactttcaggattgctatttggaatcttgacgttataataagttcaatagtgagacaattatttaagcctctaactaagaagaattattcggagttagatgatgaagaacctatggagttagattatccataaaacgaacatgaaaattattctcttcctgacattgattgtatttacatcttgcgagctatatcactatcaggagtgtgttagaggtacgactgtactactaaaagaaccttgcccatcaggaacatacgagggcaattcaccatttcaccctcttgctgacaataaatttgcactaacttgcactagcacacactttgcttttgcttgtgctgacggtactcgacatacctatcagctgcgtgcaagatcagtttcaccaaaacttttcatcagacaagaggaggttcaacaagagctctactcgccactttttctcattgttgctgctctagtatttttaatactttgcttcaccattaagagaaagacagaatgaatgagctcactttaattgacttctatttgtgctttttagcctttctgctattccttgttttaataatgcttattatattttggttttcactcgaaatccaggatctagaagaaccttgtaccaaagtctaaacgaacatgaaacttctcattgttttgacttgtatttctctatgcagttgcatatgcactgtagtacagcgctgtgcatctaataaacctcatgtgcttgaagatccttgtaaggtacaacactaggggtaatacttatagcactgcttggctttgtgctctaggaaaggttttaccttttcatagatggcacactatggttcaaacatgcacacctaatgttactatcaactgtcaagatccagctggtggtgcgcttatagctaggtgttggtaccttcatgaaggtcaccaaactgctgcatttagagacgtacttgttgttttaaataaacgaacaaattaaaatgtctgataatggaccccaatcaaaccaacgtagtgccccccgcattacatttggtggacccacagattcaactgacaataaccagaatggaggacgcaatggggcaaggccaaaacagcgccgaccccaaggtttacccaataatactgcgtcttggttcacagctctcactcagcatggcaaggaggaacttagattccctcgaggccagggcgttccaatcaacaccaatagtggtccagatgaccaaattggctactaccgaagagctacccgacgagttcgtggtggtgacggcaaaatgaaagagctcagccccagatggtacttctattacctaggaactggcccagaagcttcacttccctacggcgctaacaaagaaggcatcgtatgggttgcaactgagggagccttgaatacacccaaagaccacattggcacccgcaatcctaataacaatgctgccaccgtgctacaacttcctcaaggaacaacattgccaaaaggcttctacgcagagggaagcagaggcggcagtcaagcctcttctcgctcctcatcacgtagtcgcggtaattcaagaaattcaactcctggcagcagtaggggaaattctcctgctcgaatggctagcggaggtggtgaaactgccctcgcgctattgctgctagacagattgaaccagcttgagagcaaagtttctggtaaaggccaacaacaacaaggccaaactgtcactaagaaatctgctgctgaggcatctaaaaagcctcgccaaaaacgtactgccacaaaacagtacaacgtcactcaagcatttgggagacgtggtccagaacaaacccaaggaaatttcggggaccaagacctaatcagacaaggaactgattacaaacattggccgcaaattgcacaatttgctccaagtgcctctgcattctttggaatgtcacgcattggcatggaagtcacaccttcgggaacatggctgacttatcatggagccattaaattggatgacaaagatccacaattcaaagacaacgtcatactgctgaacaagcacattgacgcatacaaaacattcccaccaacagagcctaaaaaggacaaaaagaaaaagactgatgaagctcagcctttgccgcagagacaaaagaagcagcccactgtgactcttcttcctgcggctgacatggatgatttctccagacaacttcaaaattccatgagtggagcttctgctgattcaactcaggcataaacactcatgatgaccacacaaggcagatgggctatgtaaacgttttcgcaattccgtttacgatacatagtctactcttgtgcagaatgaattctcgtaactaaacagcacaagtaggtttagttaactttaatctcacatagcaatctttaatcaatgtgtaacattagggaggacttgaaagagccaccacattttcatcgaggccacgcggagtacgatcgagggtacagtgaataatgctagggagagctgcctatatggaagagccctaatgtgtaaaattaattttagtagtgctatccccatgtgattttaatagcttcttaggagaatgacaa

SEQ ID NO: 29763 - DNA, 29736 bp, SARS Coronavirus
ctacccaggaaaagccaaccaacctcgatctcttgtagatctgttctctaaacgaactttaaaatctgtgtagctgtcgctcggctgcatgcctagtgcacctacgcagtataaacaataataaattttactgtcgttgacaagaaacgagtaactcgtccctcttctgcagactgcttacggtttcgtccgtgttgcagtcgatcatcagcatacctaggtttcgtccgggtgtgaccgaaaggtaagatggagagccttgttcttggtgtcaacgagaaaacacacgtccaactcagtttgcctgtccttcaggttagagacgtgctagtgcgtggcttcggggactctgtggaagaggccctatcggaggcacgtgaacacctcaaaaatggcacttgtggtctagtagagctggaaaaaggcgtactgccccagcttgaacagccctatgtgttcattaaacgttctgatgccttaagcaccaatcacggccacaaggtcgttgagctggttgcagaaatggacggcattcagtacggtcgtagcggtataacactgggagtactcgtgccacatgtgggcgaaaccccaattgcataccgcaatgttcttcttcgtaagaacggtaataagggagccggtggtcatagctatggcatcgatctaaagtcttatgacttaggtgacgagcttggcactgatcccattgaagattatgaacaaaactggaacactaagcatggcagtggtgcactccgtgaactcactcgtgagctcaatggaggtgcagtcactcgctatgtcgacaacaatttctgtggcccagatgggtaccctcttgattgcatcaaagattttctcgcacgcgcgggcaagtcaatgtgcactctttccgaacaacttgattacatcgagtcgaagagaggtgtctactgctgccgtgaccatgagcatgaaattgcctggttcactgagcgctctgataagagctacgagcaccagacacccttcgaaattaagagtgccaagaaatttgacactttcaaaggggaatgcccaaagtttgtgtttcctcttaactcaaaagtcaaagtcattcaaccacgtgttgaaaagaaaaagactgagggtttcatggggcgtatacgctctgtgtaccctgttgcatctccacaggagtgtaacaatatgcacttgtctaccttgatgaaatgtaatcattgcgatgaagtttcatggcagacgtgcgactttctgaaagccacttgtgaacattgtggcactgaaaatttagttattgaaggacctactacatgtgggtacctacctactaatgctgtagtgaaaatgccatgtcctgcctgtcaagacccagagattggacctgagcatagtgttgcagattatcacaaccactcaaacattgaaactcgactccgcaagggaggtaggactagatgttttggaggctgtgtgtttgcctatgttggctgctataataagcgtgcctactgggttcctcgtgctagtgctgatattggctcaggccatactggcattactggtgacaatgtggagaccttgaatgaggatctccttgagatactgagtcgtgaacgtgttaacattaacattgttggcgattttcatttgaatgaagaggttgccatcattttggcatctttctctgcttctacaagtgcctttattgacactataaagagtcttgattacaagtctttcaaaaccattgttgagtcctgcggtaactataaagttaccaagggaaagcccgtaaaaggtgcttggaacattggacaacagagatcagttttaacaccactgtgtggttttccctcacaggctgctggtgttatcagatcaatttttgcgcgcacacttgatgcagcaaaccactcaattcctgatttgcaaagagcagctgtcaccatacttgatggtatttctgaacagtcattacgtcttgtcgacgccatggtttatacttcagacctgctcaccaacagtgtcattattatggcatatgtaactggtggtcttgtacaacagacttctcagtggttgtctaatcttttgggcactactgttgaaaaactcaggcctatctttgaatggattgaggcgaaacttagtgcaggagttgaatttctcaaggatgcttgggagattctcaaatttctcattacaggtgtttttgacatcgtcaagggtcaaatacaggttgcttcagataacatcaaggattgtgtaaaatgcttcattgatgttgttaacaaggcactcgaaatgtgcattgatcaagtcactatcgctggcgcaaagttgcgatcactcaacttaggtgaagtcttcatcgctcaaagcaagggactttaccgtcagtgtatacgtggcaaggagcagctgcaactactcatgcctcttaaggcaccaaaagaagtaacctttcttgaaggtgattcacatgacacagtacttacctctgaggaggttgttctcaagaacggtgaactcgaagcactcgagacgcccgttgatagcttcacaaatggagctatcgttggcacaccagtctgtgtaaatggcctcatgctcttagagattaaggacaaagaacaatactgcgcattgtctcctggtttactggctacaaacaatgtctttcgcttaaaagggggtgcaccaattaaaggtgtaacctttggagaagatactgtttgggaagttcaaggttacaagaatgtgagaatcacatttgagcttgatgaacgtgttgacaaagtgcttaatgaaaagtgctctgtctacactgttgaatccggtaccgaagttactgagtttgcatgtgttgtagcagaggctgttgtgaagactttacaaccagtttctgatctccttaccaacatgggtattgatcttgatgagtggagtgtagctacattctacttatttgatgatgctggtgaagaaaacttttcatcacgtatgtattgttccttttaccctccagatgaggaagaagaggacgatgcagagtgtgaggaagaagaaattgatgaaacctgtgaacatgagtacggtacagaggatgattatcaaggtctccctctggaatttggtgcctcagctgaaacagttcgagttgaggaagaagaagaggaagactggctggatgatactactgagcaatcagagattgagccagaaccagaacctacacctgaagaaccagttaatcagtttactggttatttaaaacttactgacaatgttgccattaaatgtgttgacatcgttaaggaggcacaaagtgctaatcctatggtgattgtaaatgctgctaacatacacctgaaacatggtggtggtgtagcaggtgcactcaacaaggcaaccaatggtgccatgcaaaaggagagtgatgattacattaagctaaatggccctcttacagtaggagggtcttgtttgctttctggacataatcttgctaagaagtgtctgcatgttgttggacctaacctaaatgcaggtgaggacatccagcttcttaaggcagcatatgaaaatttcaattcacaggacatcttacttgcaccattgttgtcagcaggcatatttggtgctaaaccacttcagtctttacaagtgtgcgtgcagacggttcgtacacaggtttatattgcagtcaatgacaaagctctttatgagcaggttgtcatggattatcttgataacctgaagcctagagtggaagcacctaaacaagaggagccaccaaacacagaagattccaaaactgaggagaaatctgtcgtacagaagcctgtcgatgtgaagccaaaaattaaggcctgcattgatgaggttaccacaacactggaagaaactaagtttcttaccaataagttactcttgtttgctgatatcaatggtaagctttaccatgattctcagaacatgcttagaggtgaagatatgtctttccttgagaaggatgcaccttacatggtaggtgatgttatcactagtggtgatatcacttgtgttgtaataccctccaaaaaggctggtggcactactgagatgctctcaagagctttgaagaaagtgccagttgatgagtatataaccacgtaccctggacaaggatgtgctggttatacacttgaggaagctaagactgctcttaagaaatgcaaatctgcattttatgtactaccttcagaagcacctaatgctaaggaagagattctaggaactgtatcctggaatttgagagaaatgcttgctcatgctgaagagacaagaaaattaatgcctatatgcatggatgttagagccataatggcaaccatccaacgtaagtataaaggaattaaaattcaagagggcatcgttgactatggtgtccgattcttcttttatactagtaaagagcctgtagcttctattattacgaagctgaactctctaaatgagccgcttgtcacaatgccaattggttatgtgacacatggttttaatcttgaagaggctgcgcgctgtatgcgttctcttaaagctcctgccgtagtgtcagtatcatcaccagatgctgttactacatataatggatacctcacttcgtcatcaaagacatctgaggagcactttgtagaaacagtttctttggctggctcttacagagattggtcctattcaggacagcgtacagagttaggtgttgaatttcttaagcgtggtgacaaaattgtgtaccacactctggagagccccgtcgagtttcatcttgacggtgaggttctttcacttgacaaactaaagagtctcttatccctgcgggaggttaagactataaaagtgttcacaactgtggacaacactaatctccacacacagcttgtggatatgtctatgacatatggacagcagtttggtccaacatacttggatggtgctgatgttacaaaaattaaacctcatgtaaatcatgagggtaagactttctttgtactacctagtgatgacacactacgtagtgaagctttcgagtactaccatactcttgatgagagttttcttggtaggtacatgtctgctttaaaccacacaaagaaatggaaatttcctcaagttggtggtttaacttcaattaaatgggctgataacaattgttatttgtctagtgttttattagcacttcaacagcttgaagtcaaattcaatgcaccagcacttcaagaggcttattatagagcccgtgctggtgatgctgctaacttttgtgcactcatactcgcttacagtaataaaactgttggcgagcttggtgatgtcagagaaactatgacccatcttctacagcatgctaatttggaatctgcaaagcgagttcttaatgtggtgtgtaaacattgtggtcagaaaactactaccttaacgggtgtagaagctgtgatgtatatgggtactctatcttatgataatcttaagacaggtgtttccattccatgtgtgtgtggtcgtgatgctacacaatatctagtacaacaagagtcttcttttgttatgatgtctgcaccacctgctgagtataaattacagcaaggtacattcttatgtgcgaatgagtacactggtaactatcagtgtggtcattacactcatataactgctaaggagaccctctatcgtattgacggagctcaccttacaaagatgtcagagtacaaaggaccagtgactgatgttttctacaaggaaacatcttacactacaaccatcaagcctgtgtcgtataaactcgatggagttacttacacagagattgaaccaaaattggatgggtattataaaaaggataatgcttactatacagagcagcctatagaccttgtaccaactcaaccattaccaaatgcgagttttgataatttcaaactcacatgttctaacacaaaatttgctgatgatttaaatcaaatgacaggcttcacaaagccagcttcacgagagctatctgtcacattcttcccagacttgaatggcgatgtagtggctattgactatagacactattcagcgagtttcaagaaaggtgctaaattactgcataagccaattgtttggcacattaaccaggctacaaccaagacaacgttcaaaccaaacacttggtgtttacgttgtctttggagtacaaagccagtagatacttcaaattcatttgaagttctggcagtagaagacacacaaggaatggacaatcttgcttgtgaaagtcaacaacccacctctgaagaagtagtggaaaatcctaccatacagaaggaagtcatagagtgtgacgtgaaaactaccgaagttgtaggcaatgtcatacttaaaccatcagatgaaggtgttaaagtaacacaagagttaggtcatgaggatcttatggctgcttatgtggaaaacacaagcattaccattaagaaacctaatgagctttcactagccttaggtttaaaaacaattgccactcatggtattgctgcaattaatagtgttccttggagtaaaattttggcttatgtcaaaccattcttaggacaagcagcaattacaacatcaaattgcgctaagagattagcacaacgtgtgtttaacaattatatgccttatgtgtttacattattgttccaattgtgtacttttactaaaagtaccaattctagaattagagcttcactacctacaactattgctaaaaatagtgttaagagtgttgctaaattatgtttggatgccggcattaattatgtgaagtcacccaaattttctaaattgttcacaatcgctatgtggctattgttgttaagtatttgcttaggttctctaatctgtgtaactgctgcttttggtgtactcttatctaattttggtgctccttcttattgtaatggcgttagagaattgtatcttaattcgtctaacgttactactatggatttctgtgaaggttcttttccttgcagcatttgtttaagtggattagactcccttgattcttatccagctcttgaaaccattcaggtgacgatttcatcgtacaagctagacttgacaattttaggtctggccgctgagtgggttttggcatatatgttgttcacaaaattcttttatttattaggtctttcagctataatgcaggtgttctttggctattttgctagtcatttcatcagcaattcttggctcatgtggtttatcattagtattgtacaaatggcacccgtttctgcaatggttaggatgtacatcttctttgcttctttctactacatatggaagagctatgttcatatcatggatggttgcacctcttcgacttgcatgatgtgctataagcgcaatcgtgccacacgcgttgagtgtacaactattgttaatggcatgaagagatctttctatgtctatgcaaatggaggccgtggcttctgcaagactcacaattggaattgtctcaattgtgacacattttgcactggtagtacattcattagtgatgaagttgctcgtgatttgtcactccagtttaaaagaccaatcaaccctactgaccagtcatcgtatattgttgatagtgttgctgtgaaaaatggcgcgcttcacctctactttgacaaggctggtcaaaagacctatgagagacatccgctctcccattttgtcaatttagacaatttgagagctaacaacactaaaggttcactgcctattaatgtcatagtttttgatggcaagtccaaatgcgacgagtctgcttctaagtctgcttctgtgtactacagtcagctgatgtgccaacctattctgttgcttgaccaagctcttgtatcagacgttggagatagtactgaagtttccgttaagatgtttgatgcttatgtcgacaccttttcagcaacttttagtgttcctatggaaaaacttaaggcacttgttgctacagctcacagcgagttagcaaagggtgtagctttagatggtgtcctttctacattcgtgtcagctgcccgacaaggtgttgttgataccgatgttgacacaaaggatgttattgaatgtctcaaactttcacatcactctgacttagaagtgacaggtgacagttgtaacaatttcatgctcacctataataaggttgaaaacatgacgcccagagatcttggcgcatgtattgactgtaatgcaaggcatatcaatgcccaagtagcaaaaagtcacaatgtttcactcatctggaatgtaaaagactacatgtctttatctgaacagctgcgtaaacaaattcgtagtgctgccaagaagaacaacataccttttagactaacttgtgctacaactagacaggttgtcaatgtcataactactaaaatctcactcaagggtggtaagattgttagtacttgttttaaacttatgcttaaggccacattattgtgcgttcttgctgcattggtttgttatatcgttatgccagtacatacattgtcaatccatgatggttacacaaatgaaatcattggttacaaagccattcaggatggtgtcactcgtgacatcatttctactgatgattgttttgcaaataaacatgctggttttgacgcatggtttagccagcgtggtggttcatacaaaaatgacaaaagctgccctgtagtagctgctatcattacaagagagattggtttcatagtgcctggcttaccgggtactgtgctgagagcaatcaatggtgacttcttgcattttctacctcgtgtttttagtgctgttggcaacatttgctacacaccttccaaactcattgagtatagtgattttgctacctctgcttgcgttcttgctgctgagtgtacaatttttaaggatgctatgggcaaacctgtgccatattgttatgacactaatttgctagagggttctatttcttatagtgagcttcgtccagacactcgttatgtgcttatggatggttccatcatacagtttcctaacacttacctggagggttctgttagagtagtaacaacttttgatgctgagtactgtagacatggtacatgcgaaaggtcagaagtaggtatttgcctatctaccagtggtagatgggttcttaataatgagcattacagagctctatcaggagttttctgtggtgttgatgcgatgaatctcatagctaacatctttactcctcttgtgcaacctgtgggtgctttagatgtgtctgcttcagtagtggctggtggtattattgccatattggtgacttgtgctgcctactactttatgaaattcagacgtgtttttggtgagtacaaccatgttgttgctgctaatgcacttttgtttttgatgtctttcactatactctgtctggtaccagcttacagctttctgccgggagtctactcagtcttttacttgtacttgacattctatttcaccaatgatgtttcattcttggctcaccttcaatggtttgccatgttttctcctattgtgcctttttggataacagcaatctatgtattctgtatttctctgaagcactgccattggttctttaacaactatcttaggaaaagagtcatgtttaatggagttacatttagtaccttcgaggaggctgctttgtgtacctttttgctcaacaaggaaatgtacctaaaattgcgtagcgagacactgttgccacttacacagtataacaggtatcttgctctatataacaagtacaagtatttcagtggagccttagatactaccagctatcgtgaagcagcttgctgccacttagcaaaggctctaaatgactttagcaactcaggtgctgatgttctctaccaaccaccacagacatcaatcacttctgctgttctgcagagtggttttaggaaaatggcattcccgtcaggcaaagttgaagggtgcatggtacaagtaacctgtggaactacaactcttaatggattgtggttggatgacacagtatactgtccaagacatgtcatttgcacagcagaagacatgcttaatcctaactatgaagatctgctcattcgcaaatccaaccatagctttcttgttcaggctggcaatgttcaacttcgtgttattggccattctatgcaaaattgtctgcttaggcttaaagttgatacttctaaccctaagacacccaagtataaatttgtccgtatccaacctggtcaaacattttcagttctagcatgctacaatggttcaccatctggtgtttatcagtgtgccatgagacctaatcataccattaaaggttctttccttaatggatcatgtggtagtgttggttttaacattgattatgattgcgtgtctttctgctatatgcatcatatggagcttccaacaggagtacacgctggtactgacttagaaggtaaattctatggtccatttgttgacagacaaactgcacaggctgcaggtacagacacaaccataacattaaatgttttggcatggctgtatgctgctgttatcaatggtgataggtggtttcttaatagattcaccactactttgaatgactttaaccttgtggcaatgaagtacaactatgaacctttgacacaagatcatgttgacatattgggacctctttctgctcaaacaggaattgccgtcttagatatgtgtgctgctttgaaagagctgctgcagaatggtatgaatggtcgtactatccttggtagcactattttagaagatgagtttacaccatttgatgttgttagacaatgctctggtgttaccttccaaggtaagttcaagaaaattgttaagggcactcatcattggatgcttttaactttcttgacatcactattgattcttgttcaaagtacacagtggtcactgtttttctttgtttacgagaatgctttcttgccatttactcttggtattatggcaattgctgcatgtgctatgctgcttgttaagcataagcacgcattcttgtgcttgtttctgttaccttctcttgcaacagttgcttactttaatatggtctacatgcctgctagctgggtgatgcgtatcatgacatggcttgaattggctgacactagcttgtctggttataggcttaaggattgtgttatgtatgcttcagctttagttttgcttattctcatgacagctcgcactgtttatgatgatgctgctagacgtgtttggacactgatgaatgtcattacacttgtttacaaagtctactatggtaatgctttagatcaagctatttccatgtgggccttagttatttctgtaacctctaactattctggtgtcgttacgactatcatgtttttagctagagctatagtgtttgtgtgtgttgagtattacccattgttatttattactggcaacaccttacagtgtatcatgcttgtttattgtttcttaggctattgttgctgctgctactttggccttttctgtttactcaaccgttacttcaggcttactcttggtgtttatgactacttggtctctacacaagaatttaggtatatgaactcccaggggcttttgcctcctaagagtagtattgatgctttcaagcttaacattaagttgttgggtattggaggtaaaccatgtatcaaggttgctactgtacagtctaaaatgtctgacgtaaagtgcacatctgtggtactgctctcggttcttcaacaacttagagtagagtcatcttctaaattgtgggcacaatgtgtacaactccacaatgatattcttcttgcaaaagacacaactgaagctttcgagaagatggtttctcttttgtctgttttgctatccatgcagggtgctgtagacattaataggttgtgcgaggaaatgctcgataaccgtgctactcttcaggctattgcttcagaatttagttctttaccatcatatgccgcttatgccactgcccaggaggcctatgagcaggctgtagctaatggtgattctgaagtcgttctcaaaaagttaaagaaatctttgaatgtggctaaatctgagtttgaccgtgatgctgccatgcaacgcaagttggaaaagatggcagatcaggctatgacccaaatgtacaaacaggcaagatctgaggacaagagggcaaaagtaactagtgctatgcaaacaatgctcttcactatgcttaggaagcttgataatgatgcacttaacaacattatcaacaatgcgcgtgatggttgtgttccactcaacatcataccattgactacagcagccaaactcatggttgttgtccctgattatggtacctacaagaacacttgtgatggtaacacctttacatatgcatctgcactctgggaaatccagcaagttgttgatgcggatagcaagattgttcaacttagtgaaattaacatggacaattcaccaaatttggcttggcctcttattgttacagctctaagagccaactcagctgttaaactacagaataatgaactgagtccagtagcactacgacagatgtcctgtgcggctggtaccacacaaacagcttgtactgatgacaatgcacttgcctactataacaattcgaagggaggtaggtttgtgctggcattactatcagaccaccaagatctcaaatgggctagattccctaagagtgatggtacaggtacaatttacacagaactggaaccaccttgtaggtttgttacagacacaccaaaagggcctaaagtgaaatacttgtacttcatcaaaggcttaaacaacctaaatagaggtatggtgctgggcagtttagctgctacagtacgtcttcaggctggaaatgctacagaagtacctgccaattcaactgtgctttccttctgtgcttttgcagtagaccctgctaaagcatataaggattacctagcaagtggaggacaaccaatcaccaactgtgtgaagatgttgtgtacacacactggtacaggacaggcaattactgtaacaccagaagctaacatggaccaagagtcctttggtggtgcttcatgttgtctgtattgtagatgccacattgaccatccaaatcctaaaggattctgtgacttgaaaggtaagtacgtccaaatacctaccacttgtgctaatgacccagtgggttttacacttagaaacacagtctgtaccgtctgcggaatgtggaaaggttatggctgtagttgtgaccaactccgcgaacccttgatgcagtctgcggatgcatcaacgtttttaaacgggtttgcggtgtaagtgcagcccgtcttacaccgtgcggcacaggcactagtactgatgtcgtctacagggcttttgatatttacaacgaaaaagttgctggttttgcaaagttcctaaaaactaattgctgtcgcttccaggagaaggatgaggaaggcaatttattagactcttactttgtagttaagaggcatactatgtctaactaccaacatgaagagactatttataacttggttaaagattgtccagcggttgctgtccatgactttttcaagtttagagtagatggtgacatggtaccacatatatcacgtcagcgtctaactaaatacacaatggctgatttagtctatgctctacgtcattttgatgagggtaattgtgatacattaaaagaaatactcgtcacatacaattgctgtgatgatgattatttcaataagaaggattggtatgacttcgtagagaatcctgacatcttacgcgtatatgctaacttaggtgagcgtgtacgccaatcattattaaagactgtacaattctgcgatgctatgcgtgatgcaggcattgtaggcgtactgacattagataatcaggatcttaatgggaactggtacgatttcggtgatttcgtacaagtagcaccaggctgcggagttcctattgtggattcatattactcattgctgatgcccatcctcactttgactagggcattggctgctgagtcccatatggatgctgatctcgcaaaaccacttattaagtgggatttgctgaaatatgattttacggaagagagactttgtctcttcgaccgttattttaaatattgggaccagacataccatcccaattgtattaactgtttggatgataggtgtatccttcattgtgcaaactttaatgtgttattttctactgtgtttccacctacaagttttggaccactagtaagaaaaatatttgtagatggtgttccttttgttgtttcaactggataccattttcgtgagttaggagtcgtacataatcaggatgtaaacttacatagctcgcgtctcagtttcaaggaacttttagtgtatgctgctgatccagctatgcatgcagcttctggcaatttattgctagataaacgcactacatgcttttcagtagctgcactaacaaacaatgttgcttttcaaactgtcaaacccggtaattttaataaagacttttatgactttgctgtgtctaaaggtttctttaaggaaggaagttctgttgaactaaaacacttcttctttgctcaggatggcaacgctgctatcagtgattatgactattatcgttataatctgccaacaatgtgtgatatcagacaactcctattcgtagttgaagttgttgataaatactttgattgttacgatggtggctgtattaatgccaaccaagtaatcgttaacaatctggataaatcagctggtttcccatttaataaatggggtaaggctagactttattatgactcaatgagttatgaggatcaagatgcacttttcgcgtatactaagcgtaatgtcatccctactataactcaaatgaatcttaagtatgccattagtgcaaagaatagagctcgcaccgtagctggtgtctctatctgtagtactatgacaaatagacagtttcatcagaaattattgaagtcaatagccgccactagaggagctactgtggtaattggaacaagcaagttttacggtggctggcataatatgttaaaaactgtttacagtgatgtagaaactccacaccttatgggttgggattatccaaaatgtgacagagccatgcctaacatgcttaggataatggcctctcttgttcttgctcgcaaacataacacttgctgtaacttatcacaccgtttctacaggttagctaacgagtgtgcgcaagtattaagtgagatggtcatgtgtggcggctcactatatgttaaaccaggtggaacatcatccggtgatgctacaactgcttatgctaatagtgtctttaacatttgtcaagctgttacagccaatgtaaatgcacttctttcaactgatggtaataagatagctgacaagtatgtccgcaatctacaacacaggctctatgagtgtctctatagaaatagggatgttgatcatgaattcgtggatgagttttacgcttacctgcgtaaacatttctccatgatgattctttctgatgatgccgttgtgtgctataacagtaactatgcggctcaaggtttagtagctagcattaagaactttaaggcagttctttattatcaaaataatgtgttcatgtctgaggcaaaatgttggactgagactgaccttactaaaggacctcacgaattttgctcacagcatacaatgctagttaaacaaggagatgattacgtgtacctgccttacccagatccatcaagaatattaggcgcaggctgttttgtcgatgatattgtcaaaacagatggtacacttatgattgaaaggttcgtgtcactggctattgatgcttacccacttacaaaacatcctaatcaggagtatgctgatgtctttcacttgtatttacaatacattagaaagttacatgatgagcttactggccacatgttggacatgtattccgtaatgctaactaatgataacacctcacggtactgggaacctgagttttatgaggctatgtacacaccacatacagtcttgcaggctgtaggtgcttgtgtattgtgcaattcacagacttcacttcgttgcggtgcctgtattaggagaccattcctatgttgcaagtgctgctatgaccatgtcatttcaacatcacacaaattagtgttgtctgttaatccctatgtttgcaatgccccaggttgtgatgtcactgatgtgacacaactgtatctaggaggtatgagctattattgcaagtcacataagcctcccattagttttccattatgtgctaatggtcaggtttttggtttatacaaaaacacatgtgtaggcagtgacaatgtcactgacttcaatgcgatagcaacatgtgattggactaatgctggcgattacatacttgccaacacttgtactgagagactcaagcttttcgcagcagaaacgctcaaagccactgaggaaacatttaagctgtcatatggtattgccactgtacgcgaagtactctctgacagagaattgcatctttcatgggaggttggaaaacctagaccaccattgaacagaaactatgtctttactggttaccgtgtaactaaaaatagtaaagtacagattggagagtacacctttgaaaaaggtgactatggtgatgctgttgtgtacagaggtactacgacatacaagttgaatgttggtgattactttgtgttgacatctcacactgtaatgccacttagtgcacctactctagtgccacaagagcactatgtgagaattactggcttgtacccaacactcaacatctcagatgagttttctagcaatgttgcaaattatcaaaaggtcggcatgcaaaagtactctacactccaaggaccacctggtactggtaagagtcattttgccatcggacttgctctctattacccatctgctcgcatagtgtatacggcatgctctcatgcagctgttgatgccctatgtgaaaaggcattaaaatatttgcccatagataaatgtagtagaatcatacctgcgcgtgcgcgcgtagagtgttttgataaattcaaagtgaattcaacactagaacagtatgttttctgcactgtaaatgcattgccagaaacaactgctgacattgtagtctttgatgaaatctctatggctactaattatgacttgagtgttgtcaatgctagacttcgtgcaaaacactacgtctatattggcgatcctgctcaattaccagccccccgcacattgctgactaaaggcacactagaaccagaatattttaattcagtgtgcagacttatgaaaacaataggtccagacatgttccttggaacttgtcgccgttgtcctgctgaaattgttgacactgtgagtgctttagtttatgacaataagctaaaagcacacaaggataagtcagctcaatgcttcaaaatgttctacaaaggtgttattacacatgatgtttcatctgcaatcaacagacctcaaataggcgttgtaagagaatttcttacacgcaatcctgcttggagaaaagctgtttttatctcaccttataattcacagaacgctgtagcttcaaaaatcttaggattgcctacgcagactgttgattcatcacagggttctgaatatgactatgtcatattcacacaaactactgaaacagcacactcttgtaatgtcaaccgtttcaatgtggctatcacaagggcaaaaattggcattttgtgcataatgtctgatagagatctttatgacaaactgcaatttacaagtctagaaataccacgtcgcaatgtggctacattacaagcagaaaatgtaactggactttttaaggactgtagtaagatcattactggtcttcatcctacacaggcacctacacacctcagcgttgatataaagttcaagactgaaggattatgtgttgacataccaggcataccaaaggacatgacctaccgtagactcatctctatgatgggtttcaaaatgaattaccaagtcaatggttaccctaatatgtttatcacccgcgaagaagctattcgtcacgttcgtgcgtggattggctttgatgtagagggctgtcatgcaactagagatgctgtgggtactaacctacctctccagctaggattttctacaggtgttaacttagtagctgtaccgactggttatgttgacactgaaaataacacagaattcaccagagttaatgcaaaacctccaccaggtgaccagtttaaacatcttataccactcatgtataaaggcttgccctggaatgtagtgcgtattaagatagtacaaatgctcagtgatacactgaaaggattgtcagacagagtcgtgttcgtcctttgggcgcatggctttgagcttacatcaatgaagtactttgtcaagattggacctgaaagaacgtgttgtctgtgtgacaaacgtgcaacttgcttttctacttcatcagatacttatgcctgctggaatcattctgtgggttttgactatgtctataacccatttatgattgatgttcagcagtggggctttacgggtaaccttcagagtaaccatgaccaacattgccaggtacatggaaatgcacatgtggctagttgtgatgctatcatgactagatgtttagcagtccatgagtgctttgttaagcgcgttgattggtctgttgaataccctattataggagatgaactgagggttaattctgcttgcagaaaagtacaacacatggttgtgaagtctgcattgcttgctgataagtttccagttcttcatgacattggaaatccaaaggctatcaagtgtgtgcctcaggctgaagtagaatggaagttctacgatgctcagccatgtagtgacaaagcttacaaaatagaggaactcttctattcttatgctacacatcacgataaattcactgatggtgtttgtttgttttggaattgtaacgttgatcgttacccagccaatgcaattgtgtgtaggtttgacacaagagtcttgtcaaacttgaacttaccaggctgtgatggtggtagtttgtatgtgaataagcatgcattccacactccagctttcgataaaagtgcatttactaatttaaagcaattgcctttcttttactattctgatagtccttgtgagtctcatggcaaacaagtagtgtcggatattgattatgttccactcaaatctgctacgtgtattacacgatgcaatttaggtggtgctgtttgcagacaccatgcaaatgagtaccgacagtacttggatgcatataatatgatgatttctgctggatttagcctatggatttacaaacaatttgatacttataacctgtggaatacatttaccaggttacagagtttagaaaatgtggcttataatgttgttaataaaggacactttgatggacacgccggcgaagcacctgtttccatcattaataatgctgtttacacaaaggtagatggtattgatgtggagatctttgaaaataagacaacacttcctgttaatgttgcatttgagctttgggctaagcgtaacattaaaccagtgccagagattaagatactcaataatttgggtgttgatatcgctgctaatactgtaatctgggactacaaaagagaagccccagcacatgtatctacaataggtgtctgcacaatgactgacattgccaagaaacctactgagagtgcttgttcttcacttactgtcttgtttgatggtagagtggaaggacaggtagacctttttagaaacgcccgtaatggtgttttaataacagaaggttcagtcaaaggtctaacaccttcaaagggaccagcacaagctagcgtcaatggagtcacattaattggagaatcagtaaaaacacagtttaactactttaagaaagtagacggcattattcaacagttgcctgaaacctactttactcagagcagagacttagaggattttaagcccagatcacaaatggaaactgactttctcgagctcgctatggatgaattcatacagcgatataagctcgagggctatgccttcgaacacatcgtttatggagatttcagtcatggacaacttggcggtcttcatttaatgataggcttagccaagcgctcacaagattcaccacttaaattagaggattttatccctatggacagcacagtgaaaaattacttcataacagatgcgcaaacaggttcatcaaaatgtgtgtgttctgtgattgatcttttacttgatgactttgtcgagataataaagtcacaagatttgtcagtgatttcaaaagtggtcaaggttacaattgactatgctgaaatttcattcatgctttggtgtaaggatggacatgttgaaaccttctacccaaaactacaagcaagtcaagcgtggcaaccaggtgttgcgatgcctaacttgtacaagatgcaaagaatgcttcttgaaaagtgtgaccttcagaattatggtgaaaatgctgttataccaaaaggaataatgatgaatgtcgcaaagtatactcaactgtgtcaatacttaaatacacttactttagctgtaccctacaacatgagagttattcactttggtgctggctctgataaaggagttgcaccaggtacagctgtgctcagacaatggttgccaactggcacactacttgtcgattcagatcttaatgacttcgtctccgacgcagattctactttaattggagactgtgcaacagtacatacggctaataaatgggaccttattattagcgatatgtatgaccctaggaccaaacatgtgacaaaagagaatgactctaaagaagggtttttcacttatctgtgtggatttataaagcaaaaactagccctgggtggttctatagctgtaaagataacagagcattcttggaatgctgacctttacaagcttatgggccatttctcatggtggacagcttttgttacaaatgtaaatgcatcatcatcggaagcatttttaattggggctaactatcttggcaagccgaaggaacaaattgatggctataccatgcatgctaactacattttctggaggaacacaaatcctatccagttgtcttcctattcactctttgacatgagcaaatttcctcttaaattaagaggaactgctgtaatgtctcttaaggagaatcaaatcaatgatatgatttattctcttctggaaaaaggtaggcttatcattagagaaaacaacagagttgtggtttcaagtgatattcttgttaacaactaaacgaacatgtttattttcttattatttcttactctcactagtggtagtgaccttgaccggtgcaccacttttgatgatgttcaagctcctaattacactcaacatacttcatctatgaggggggtttactatcctgatgaaatttttagatcagacactctttatttaactcaggatttatttcttccattttattctaatgttacagggtttcatactattaatcatacgtttggcaaccctgtcataccttttaaggatggtatttattttgctgccacagagaaatcaaatgttgtccgtggttgggtttttggttctaccatgaacaacaagtcacagtcggtgattattattaacaattctactaatgttgttatacgagcatgtaactttgaattgtgtgacaaccctttctttgctgtttctaaacccatgggtacacagacacatactatgatattcgataatgcatttaattgcactttcgagtacatatctgatgccttttcgcttgatgtttcagaaaagtcaggtaattttaaacacttacgagagtttgtgtttaaaaataaagatgggtttctctatgtttataagggctatcaacctatagatgtagttcgtgatctaccttctggttttaacactttgaaacctatttttaagttgcctcttggtattaacattacaaattttagagccattcttacagccttttcacctgctcaagacatttggggcacgtcagctgcagcctattttgttggctatttaaagccaactacatttatgctcaagtatgatgaaaatggtacaatcacagatgctgttgattgttctcaaaatccacttgctgaactcaaatgctctgttaagagctttgagattgacaaaggaatttaccagacctctaatttcagggttgttccctcaggagatgttgtgagattccctaatattacaaacttgtgtccttttggagaggtttttaatgctactaaattcccttctgtctatgcatgggagagaaaaaaaatttctaattgtgttgctgattactctgtgctctacaactcaacatttttttcaacctttaagtgctatggcgtttctgccactaagttgaatgatctttgcttctccaatgtctatgcagattcttttgtagtcaagggagatgatgtaagacaaatagcgccaggacaaactggtgttattgctgattataattataaattgccagatgatttcatgggttgtgtccttgcttggaatactaggaacattgatgctacttcaactggtaattataattataaatataggtatcttagacatggcaagcttaggccctttgagagagacatatctaatgtgcctttctcccctgatggcaaaccttgcaccccacctgctcttaattgttattggccattaaatgattatggtttttacaccactactggcattggctaccaaccttacagagttgtagtactttcttttgaacttttaaatgcaccggccacggtttgtggaccaaaattatccactgaccttattaagaaccagtgtgtcaattttaattttaatggactcactggtactggtgtgttaactccttcttcaaagagatttcaaccatttcaacaatttggccgtgatgtttctgatttcactgattccgttcgagatcctaaaacatctgaaatattagacatttcaccttgctcttttgggggtgtaagtgtaattacacctggaacaaatgcttcatctgaagttgctgttctatatcaagatgttaactgcactgatgtttctacagcaattcatgcagatcaactcacaccagcttggcgcatatattctactggaaacaatgtattccagactcaagcaggctgtcttataggagctgagcatgtcgacacttcttatgagtgcgacattcctattggagctggcatttgtgctagttaccatacagtttctttattacgtagtactagccaaaaatctattgtggcttatactatgtctttaggtgctgatagttcaattgcttactctaataacaccattgctatacctactaacttttcaattagcattactacagaagtaatgcctgtttctatggctaaaacctccgtagattgtaatatgtacatctgcggagattctactgaatgtgctaatttgcttctccaatatggtagcttttgcacacaactaaatcgtgcactctcaggtattgctgctgaacaggatcgcaacacacgtgaagtgttcgctcaagtcaaacaaatgtacaaaaccccaactttgaaatattttggtggttttaatttttcacaaatattacctgaccctctaaagccaactaagaggtcttttattgaggacttgctctttaataaggtgacactcgctgatgctggcttcatgaagcaatatggcgaatgcctaggtgatattaatgctagagatctcatttgtgcgcagaagttcaatggacttacagtgttgccacctctgctcactgatgatatgattgctgcctacactgctgctctagttagtggtactgccactgctggatggacatttggtgctggcgctgctcttcaaataccttttgctatgcaaatggcatataggttcaatggcattggagttacccaaaatgttctctatgagaaccaaaaacaaatcgccaaccaatttaacaaggcgattagtcaaattcaagaatcacttacaacaacatcaactgcattgggcaagctgcaagacgttgttaaccagaatgctcaagcattaaacacacttgttaaacaacttagctctaattttggtgcaatttcaagtgtgctaaatgatatcctttcgcgacttgataaagtcgaggcggaggtacaaattgacaggttaattacaggcagacttcaaagccttcaaacctatgtaacacaacaactaatcagggctgctgaaatcagggcttctgctaatcttgctgctactaaaatgtctgagtgtgttcttggacaatcaaaaagagttgacttttgtggaaagggctaccaccttatgtccttcccacaagcagccccgcatggtgttgtcttcctacatgtcacgtatgtgccatcccaggagaggaacttcaccacagcgccagcaatttgtcatgaaggcaaagcatacttccctcgtgaaggtgtttttgtgtttaatggcacttcttggtttattacacagaggaacttcttttctccacaaataattactacagacaatacatttgtctcaggaaattgtgatgtcgttattggcatcattaacaacacagtttatgatcctctgcaacctgagcttgactcattcaaagaagagctggacaagtacttcaaaaatcatacatcaccagatgttgatcttggcgacatttcaggcattaacgcttctgtcgtcaacattcaaaaagaaattgaccgcctcaatgaggtcgctaaaaatttaaatgaatcactcattgaccttcaagaattgggaaaatatgagcaatatattaaatggccttggtatgtttggctcggcttcattgctggactaattgccatcgtcatggttacaatcttgctttgttgcatgactagttgttgcagttgcctcaagggtgcatgctcttgtggttcttgctgcaagtttgatgaggatgactctgagccagttctcaagggtgtcaaattacattacacataaacgaacttatggatttgtttatgagattttttactcttggatcaattactgcacagccagtaaaaattgacaatgcttctcctgcaagtactgttcatgctacagcaacgataccgctacaagcctcactccctttcggatggcttgttattggcgttgcatttcttgctgtttttcagagcgctaccaaaataattgcgctcaataaaagatggcagctagccctttataagggcttccagttcatttgcaatttactgctgctatttgttaccatctattcacatcttttgcttgtcgctgcaggtatggaggcgcaatttttgtacctctatgccttgatatattttctacaatgcatcaacgcatgtagaattattatgagatgttggctttgttggaagtgcaaatccaagaacccattactttatgatgccaactactttgtttgctggcacacacataactatgactactgtataccatataacagtgtcacagatacaattgtcgttactgaaggtgacggcatttcaacaccaaaactcaaagaagactaccaaattggtggttattctgaggataggcactcaggtgttaaagactatgtcgttgtacatggctatttcaccgaagtttactaccagcttgagtctacacaaattactacagacactggtattgaaaatgctacattcttcatctttaacaagcttgttaaagacccaccgaatgtgcaaatacacacaatcgacggctcttcaggagttgctaatccagcaatggatccaatttatgatgagccgacgacgactactagcgtgcctttgtaagcacaagaaagtgagtacgaacttatgtactcattcgtttcggaagaaacaggtacgttaatagttaatagcgtacttctttttcttgctttcgtggtattcttgctagtcacactagccatccttactgcgcttcgattgtgtgcgtactgctgcaatattgttaacgtgagtttagtaaaaccaacggtttacgtctactcgcgtgttaaaaatctgaactcttctgaaggagttcctgatcttctggtctaaacgaactaactattattattattctgtttggaactttaacattgcttatcatggcagacaacggtactattaccgttgaggagcttaaacaactcctggaacaatggaacctagtaataggtttcctatgcctagcctggattatgttactacaatttgcctattctaatcggaacaggtttttgtacataataaagcttgttttcctctggctcttgtggccagtaacacttgcttgttttgtgcttgctgctgtctacagaattaattgggtgactggcgggattgcgattgcaatggcttgtattgtaggcttgatgtggcttagctacttcgttgcttccttcaggctgtttgctcgtacccgctcaatgtggtcattcaacccagaaacaaacattcttctcaatgtgcctctccgggggacaattgtgaccagaccgctcatggaaagtgaacttgtcattggtgctgtgatcattcgtggtcacttgcgaatggccggacactccctagggcgctgtgacattaaggacctgccaaaagagatcactgtggctacatcacgaacgctttcttattacaaattaggagcgtcgcagcgtgtaggcactgattcaggttttgctgcatacaaccgctaccgtattggaaactataaattaaatacagaccacgccggtagcaacgacaatattgctttgctagtacagtaagtgacaacagatgtttcatcttgttgacttccaggttacaatagcagagatattgattatcattatgaggactttcaggattgctatttggaatcttgacgttataataagttcaatagtgagacaattatttaagcctctaactaagaagaattattcggagttagatgatgaagaacctatggagttagattatccataaaacgaacatgaaaattattctcttcctgacattgattgtatttacatcttgcgagctatatcactatcaggagtgtgttagaggtacgactgtactactaaaagaaccttgcccatcaggaacatacgagggcaattcaccatttcaccctcttgctgacaataaatttgcactaacttgcactagcacacactttgcttttgcttgtgctgacggtactcgacatacctatcagctgcgtgcaagatcagtttcaccaaaacttttcatcagacaagaggaggttcaacaagagctctactcgccactttttctcattgttgctgctctagtatttttaatactttgcttcaccattaagagaaagacagaatgaatgagctcactttaattgacttctatttgtgctttttagcctttctgctattccttgttttaataatgcttattatattttggttttcactcgaaatccaggatctagaagaaccttgtaccaaagtctaaacgaacatgaaacttctcattgttttgacttgtatttctctatgcagttgcatatgcactgtagtacagcgctgtgcatctaataaacctcatgtgcttgaagatccttgtaaggtacaacactaggggtaatacttatagcactgcttggctttgtgctctaggaaaggttttaccttttcatagatggcacactatggttcaaacatgcacacctaatgttactatcaactgtcaagatccagctggtggtgcgcttatagctaggtgttggtaccttcatgaaggtcaccaaactgctgcatttagagacgtacttgttgttttaaataaacgaacaaattaaaatgtctgataatggaccccaatcaaaccaacgtagtgccccccgcattacatttggtggacccacagattcaactgacaataaccagaatggaggacgcaatggggcaaggccaaaacagcgccgaccccaaggtttacccaataatactgcgtcttggttcacagctctcactcagcatggcaaggaggaacttagattccctcgaggccagggcgttccaatcaacaccaatagtggtccagatgaccaaattggctactaccgaagagctacccgacgagttcgtggtggtgacggcaaaatgaaagagctcagccccagatggtacttctattacctaggaactggcccagaagcttcacttccctacggcgctaacaaagaaggcatcgtatgggttgcaactgagggagccttgaatacacccaaagaccacattggcacccgcaatcctaataacaatgctgccaccgtgctacaacttcctcaaggaacaacattgccaaaaggcttctacgcagagggaagcagaggcggcagtcaagcctcttctcgctcctcatcacgtagtcgctgtaattcaagaaattcaactcctggcagcagtaggggaaattctcctgctcgaatggctagcggaggtggtgaaactgccctcgcgctattgctgctagacagattgaaccagcttgagagcaaagtttctggtaaaggccaacaacaacaaggccaaactgtcactaagaaatctgctgctgaggcatctaaaaagcctcgccaaaaacgtactgccacaaaacagtacaacgtcactcaagcatttgggagacgtggtccagaacaaacccaaggaaatttcggggaccaagacctaatcagacaaggaactgattacaaacattggccgcaaattgcacaatttgctccaagtgcctctgcattctttggaatgtcacgcattggcatggaagtcacaccttcgggaacatggctgacttatcatggagccattaaattggatgacaaagatccacaattcaaagacaacgtcatactgctgaacaagcacattgacgcatacaaaacattcccaccaacagagcctaaaaaggacaaaaagaaaaagactgatgaagctcagcctttgccgcagagacaaaagaagcagcccactgtgactcttcttcctgcggctgacatggatgatttctccagacaacttcaaaattccatgagtggagcttctgctgattcaactcaggcataaacactcatgatgaccacacaaggcagatgggctatgtaaacgttttcgcaattccgtttacgatacatagtctactcttgtgcagaatgaattctcgtaactaaacagcacaagtaggtttagttaactttaatctcacatagcaatctttaatcaatgtgtaacattagggaggacttgaaagagccaccacattttcatcgaggccacgcggagtacgatcgagggtacagtgaataatgctagggagagctgcctatatggaagagccctaatgtgtaaaattaattttagtagtgctatccccatgtgattttaatagcttcttaggagaatgacaaaaaaaaaaaaaaaaaaaaaaaa

SEQ ID NO: 29764 - DNA, 646 bp, SARS Coronavirus
acaggacgctgtagcttcaaaaatcttaggattgcctacgcagactgttgattcatcacagggttctgaatatgactatgtcatattcacacaaactactgaaacagcacactcttgtaatgtcaaccgcttcaatgtggctatcacaagggcaaaaattggcattttgtgcataatgtctgatagagatctttatgacaaactgcaatttacaagtctagaaataccacgtcgcaatgtggctacattacaagcagaaaatgtaactggactttttaaggactgtagtaagatcattactggtcttcatcctacacaggcacctacacacctcagcgttgatataaaattcaagactgaaggattatgtgttgacataccaggcataccaaaggacatgacctaccgtagactcatctctatgatgggtttcaaaatgaattaccaagtcaatggttaccctaatatgtttatcacccgcgaagaagctattcgtcacgttcgtgcgtggattggctttgatgtagagggctgtcatgcaactagagatgctgtgggtactaacctacctctccagctaggattttctacaggtgttaacttagtagctgtaccgactggttatgttgacactgaaaataaccta

SEQ ID NO: 29765 - DNA, 433 bp, SARS Coronavirus; identical to SEQ ID NO: 29743
  misc_feature 424: n = A,T,C or G

SEQ ID NO: 29766 - DNA, 1215 bp, SARS Coronavirus
tacccaggaaaagccaaccaacctcgatctcttgtagatctgttctctaaacgaactttaaaatctgtgtagctgtcgctcggctgcatgcctagtgcacctacgcagtataaacaataataaattttactgtcgttgacaagaaacgagtaactcgtccctcttctgcagactgcttacggtttcgtccgtgttgcagtcgatcatcagcatacctaggtttcgtccgggtgtgaccgaaaggtaagatggagagccttgttcttggtgtcaacgagaaaacacacgtccaactcagtttgcctgtccttcaggttagagacgtgctagtgcgtggcttcggggactctgtggaagaggccctatcggaggcacgtgaacacctcaaaaatggcacttgtggtctagtagagctggaaaaaggcgtactgccccagcttgaacagccctatgtgttcattaaacgttctgatgccttaagcaccaatcacggccacaaggtcgttgagctggttgcagaaatggacggcattcagtacggtcgtagcggtataacactgggagtactcgtgccacatgtgggcgaaaccccaattgcataccgcaatgttcttcttcgtaagaacggtaataagggagccggtggtcatagctatggcatcgatctaaagtcttatgacttaggtgacgagcttggcactgatcccattgaagattatgaacaaaactggaacactaagcatggcagtggtgcactccgtgaactcactcgtgagctcaatggaggtgcagtcactcgctatgtcgacaacaatttctgtggcccagatgggtaccctcttgattgcatcaaagattttctcgcacgcgcgggcaagtcaatgtgcactctttccgaacaacttgattacatcgagtcgaagagaggtgtctactgctgccgtgaccatgagcatgaaattgcctggttcactgagcgctctgataagagctacgagcaccagacacccttcgaaattaagagtgccaagaaatttgacactttcaaaggggaatgcccaaagtttgtgtttcctcttaactcaaaagtcaaagtcattcaaccacgtgttgaaaagaaaaagactgagggtttcatggggcgtatacgctctgtgtaccctgttgcatctccacaggagtgtaacaatatgcacttgtctaccttgatgaaat

SEQ ID NO: 29767 - DNA, 1269 bp, SARS Coronavirus
atgtctgataatggaccccaatcaaaccaacgtagtgccccccgcattacatttggtggacccacagattcaactgacaataaccagaatggaggacgcaatggggcaaggccaaaacagcgccgaccccaaggtttacccaataatattgcgtcttggttcacagctctcactcagcatggcaaggaggaacttagattccctcgaggccagggcgttccaatcaacaccaatagtggtccagatgaccaaattggctactaccgaagagctacccgacgagttcgtggtggtgacggcaaaatgaaagagctcagccccagatggtacttctattacctaggaactggcccagaagcttcacttccctacggcgctaacaaagaaggcatcgtatgggttgcaactgagggagccttgaatacacccaaagaccacattggcacccgcaatcctaataacaatgctgccaccgtgctacaacttcctcaaggaacaacattgccaaaaggcttctacgcagagggaagcagaggcggcagtcaagcctcttctcgctcctcatcacgtagtcgcggtaattcaagaaattcaactcctggcagcagtaggggaaattctcctgctcgaatggctagcggaggtggtgaaactgccctcgcgctattgctgctagacagattgaaccagcttgagagcaaagtttctggtaaaggccaacaacaacaaggccaaactgtcactaagaaatctgctgctgaggcatctaaaaagcctcgccaaaaacgtactgccacaaaacagtacaacgtcactcaagcatttgggagacgtggtccagaacaaacccaaggaaatttcggggaccaagacctaatcagacaaggaactgattacaaacattggccgcaaattgcacaatttgctccaagtgcctctgcattctttggaatgtcacgcattggcatggaagtcacaccttcgggaacatggctgacttatcatggagccattaaattggatgacaaagatccacaattcaaagacaacgtcatactgctgaacaagcacattgacgcatacaaaacattcccaccaacagagcctaaaaaggacaaaaagaaaaagactgatgaagctcagcctttgccgcagagacaaaagaagcagcccactgtgactcttcttcctgcggctgacatggatgatttctccagacaacttcaaaattccatgagtggagcttctgctgattcaactcaggcataa

SEQ ID NO: 29768 - DNA, 29745 bp, SARS Coronavirus
atattaggtttttacctacccaggaaaagccaaccaacctcgatctcttgtagatctgttctctaaacgaactttaaaatctgtgtagctgtcgctcggctgcatgcctagtgcacctacgcagtataaacaataataaattttactgtcgttgacaagaaacgagtaactcgtccctcttctgcagactgcttacggtttcgtccgtgttgcagtcgatcatcagcatacctaggtttcgtccgggtgtgaccgaaaggtaagatggagagccttgttcttggtgtcaacgagaaaacacacgtccaactcagtttgcctgtccttcaggttagagacgtgctagtgcgtggcttcggggactctgtggaagaggccctatcggaggcacgtgaacacctcaaaaatggcacttgtggtctagtagagctggaaaaaggcgtactgccccagcttgaacagccctatgtgttcattaaacgttctgatgccttaagcaccaatcacggccacaaggtcgttgagctggttgcagaaatggacggcattcagtacggtcgtagcggtataacactgggagtactcgtgccacatgtgggcgaaaccccaattgcataccgcaatgttcttcttcgtaagaacggtaataagggagccggtggtcatagctatggcatcgatctaaagtcttatgacttaggtgacgagcttggcactgatcccattgaagattatgaacaaaactggaacactaagcatggcagtggtgcactccgtgaactcactcgtgagctcaatggaggtgcagtcactcgctatgtcgacaacaatttctgtggcccagatgggtaccctcttgattgcatcaaagattttctcgcacgcgcgggcaagtcaatgtgcactctttccgaacaacttgattacatcgagtcgaagagaggtgtctactgctgccgtgaccatgagcatgaaattgcctggttcactgagcgctctgataagagctacgagcaccagacacccttcgaaattaagagtgccaagaaatttgacactttcaaaggggaatgcccaaagtttgtgtttcctcttaactcaaaagtcaaagtcattcaaccacgtgttgaaaagaaaaagactgagggtttcatggggcgtatacgctctgtgtaccctgttgcatctccacaggagtgtaacaatatgcacttgtctaccttgatgaaatgtaatcattgcgatgaagtttcatggcagacgtgcgactttctgaaagccacttgtgaacattgtggcactgaaaatttagttattgaaggacctactacatgtgggtacctacctactaatgctgtagtgaaaatgccatgtcctgcctgtcaagacccagagattggacctgagcatagtgttgcagattatcacaaccactcaaacattgaaactcgactccgcaagggaggtaggactagatgttttggaggctgtgtgtttgcctatgttggctgctataataagcgtgcctactgggttcctcgtgctagtgctgatattggctcaggccatactggcattactggtgacaatgtggagaccttgaatgaggatctccttgagatactgagtcgtgaacgtgttaacattaacattgttggcgattttcatttgaatgaagaggttgccatcattttggcatctttctctgcttctacaagtgcctttattgacactataaagagtcttgattacaagtctttcaaaaccattgttgagtcctgcggtaactataaagttaccaagggaaagcccgtaaaaggtgcttggaacattggacaacagagatcagttttaacaccactgtgtggttttccctcacaggctgctggtgttatcagatcaatttttgcgcgcacacttgatgcagcaaaccactcaattcctgatttgcaaagagcagctgtcaccatacttgatggtatttctgaacagtcattacgtcttgtcgacgccatggtttatacttcagacctgctcaccaacagtgtcattattatggcatatgtaactggtggtcttgtacaacagacttctcagtggttgtctaatcttttgggcactactgttgaaaaactcaggcctatctttgaatggattgaggcgaaacttagtgcaggagttgaatttctcaaggatgcttgggagattctcaaatttctcattacaggtgtttttgacatcgtcaagggtcaaatacaggttgcttcagataacatcaaggattgtgtaaaatgcttcattgatgttgttaacaaggcactcgaaatgtgcattgatcaagtcactatcgctggcgcaaagttgcgatcactcaacttaggtgaagtcttcatcgctcaaagcaagggactttaccgtcagtgtatacgtggcaaggagcagctgcaactactcatgcctcttaaggcaccaaaagaagtaacctttcttgaaggtgattcacatgacacagtacttacctctgaggaggttgttctcaagaacggtgaactcgaagcactcgagacgcccgttgatagcttcacaaatggagctatcgttggcacaccagtctgtgtaaatggcctcatgctcttagagattaaggacaaagaacaatactgcgcattgtctcctggtttactggctacaaacaatgtctttcgcttaaaagggggtgcaccaattaaaggtgtaacctttggagaagatactgtttgggaagttcaaggttacaagaatgtgagaatcacatttgagcttgatgaacgtgttgacaaagtgcttaatgaaaagtgctctgtctacactgttgaatccggtaccgaagttactgagtttgcatgtgttgtagcagaggctgttgtgaagactttacaaccagtttctgatctccttaccaacatgggtattgatcttgatgagtggagtgtagctacattctacttatttgatgatgctggtgaagaaaacttttcatcacgtatgtattgttccttttaccctccagatgaggaagaagaggacgatgcagagtgtgaggaagaagaaattgatgaaacctgtgaacatgagtacggtacagaggatgattatcaaggtctccctctggaatttggtgcctcagctgaaacagttcgagttgaggaagaagaagaggaagactggctggatgatactactgagcaatcagagattgagccagaaccagaacctacacctgaagaaccagttaatcagtttactggttatttaaaacttactgacaatgttgccattaaatgtgttgacatcgttaaggaggcacaaagtgctaatcctatggtgattgtaaatgctgctaacatacacctgaaacatggtggtggtgtagcaggtgcactcaacaaggcaaccaatggtgccatgcaaaaggagagtgatgattacattaagctaaatggccctcttacagtaggagggtcttgtttgctttctggacataatcttgctaagaagtgtctgcatgttgttggacctaacctaaatgcaggtgaggacatccagcttcttaaggcagcatatgaaaatttcaattcacaggacatcttacttgcaccattgttgtcagcaggcatatttggtgctaaaccacttcagtctttacaagtgtgcgtgcagacggttcgtacacaggtttatattgcagtcaatgacaaagctctttatgagcaggttgtcatggattatcttgataacctgaagcctagagtggaagcacctaaacaagaggagccaccaaacacagaagattccaaaactgaggagaaatctgtcgtacagaagcctgtcgatgtgaagccaaaaattaaggcctgcattgatgaggttaccacaacactggaagaaactaagtttcttaccaataagttactcttgtttgctgatatcaatggtaagctttaccatgattctcagaacatgcttagaggtgaagatatgtctttccttgagaaggatgcaccttacatggtaggtgatgttatcactagtggtgatatcacttgtgttgtaataccctccaaaaaggctggtggcactactgagatgctctcaagagctttgaagaaagtgccagttgatgagtatataaccacgtaccctggacaaggatgtgctggttatacacttgaggaagctaagactgctcttaagaaatgcaaatctgcattttatgtactaccttcagaagcacctaatgctaaggaagagattctaggaactgtatcctggaatttgagagaaatgcttgctcatgctgaagagacaagaaaattaatgcctatatgcatggatgttagagccataatggcaaccatccaacgtaagtataaaggaattaaaattcaagagggcatcgttgactatggtgtccgattcttcttttatactagtaaagagcctgtagcttctattattacgaagctgaactctctaaatgagccgcttgtcacaatgccaattggttatgtgacacatggttttaatcttgaagaggctgcgcgctgtatgcgttctcttaaagctcctgccgtagtgtcagtatcatcaccagatgctgttactacatataatggatacctcacttcgtcatcaaagacatctgaggagcactttgtagaaacagtttctttggctggctcttacagagattggtcctattcaggacagcgtacagagttaggtgttgaatttcttaagcgtggtgacaaaattgtgtaccacactctggagagccccgtcgagtttcatcttgacggtgaggttctttcacttgacaaactaaagagtctcttatccctgcgggaggttaagactataaaagtgttcacaactgtggacaacactaatctccacacacagcttgtggataagtctatgacatatggacagcagtttggtccaacatacttggatggtgctgatgttacaaaaattaaacctcatgtaaatcatgagggtaagactttctttgtactacctagtgatgacacactacgtagtgaagctttcgagtactaccatactcttgatgagagttttcttggtaggtacatgtctgctttaaaccacacaaagaaatggaaatttcctcaagttggtggtttaacttcaattaaatgggctgataacaattgttatttgtctagtgttttattagcacttcaacagcttgaagtcaaattcaatgcaccagcacttcaagaggcttattatagagcccgtgctggtgatgctgctaacttttgtgcactcatactcgcttacagtaataaaactgttggcgagcttggtgatgtcagagaaactatgacccatcttctacagcatgctaatttggaatctgcaaagcgagttcttaatgtggtgtgtaaacattgtggtcagaaaactactaccttaacgggtgtagaagctgtgatgtatatgggtactctatcttatgataatcttaagacaggtgtttccattccatgtgtgtgtggtcgtgatgctacacaatatctagtacaacaagagtcttcttttgttatgatgtctgcaccacctgctgagtataaattacagcaaggtacattcttatgtgcgaatgagtacactgttaactatcagtgtggtcattacactcatataactgctaaggagaccctctatcgtattgacggagctcaccttacaaagatgtcagagtacaaaggaccagtgactgatgttttctacaaggaaacatcttacactacaaccatcaagcctgtgtcgtataaactcgatggagttacttacacagagattgaaccaaaattggatgggtattataaaaaggataatgcttactatacagagcagcctatagaccttgtaccaactcaaccattaccaaatgcgagttttgataatttcaaactcacatgttctaacacaaaatttgctgatgatttaaatcaaatgacaggcttcacaaagccagcttcacgagagctatctgtcacattcttcccagacttgaatggcgatgtagtggctattgactatagacactattcagcgagtttcaagaaaggtgctaaattactgcataagccaattgtttggcacattaaccaggctacaaccaagacaacgttcaaaccaaacacttggtgtttacgttgtctttggagtacaaagccagtagatacttcaaattcatttgaagttctggcagtagaagacacacaaggaatggacaatcttgcttgtgaaagtcaacaacccacctctgaagaagtagtggaaaatcctaccatacagaaggaagtcatagagtgtgacgtgaaaactaccgaagttgtaggcaatgtcatacttaaaccatcagatgaaggtgttaaagtaacacaagagttaggtcatgaggatcttatggctgcttatgtggaaaacacaagcattaccattaagaaacctaatgagctttcactagccttaggtttaaaaacaattgccactcatggtattgctgcaattaatagtgttccttggagtaaaattttggcttatgtcaaaccattcttaggacaagcagcaattacaacatcaaattgcgctaagagattagcacaacgtgtgtttaacaattatatgccttatgtgtttacattattgttccaattgtgtacttttactaaaagtaccaattctagaattagagcttcactacctacaactattgctaaaaatagtgttaagagtgttgctaaattatgtttggatgccggcattaattatgtgaagtcacccaaattttctaaattgttcacaatcgctatgtggctattgttgttaagtatttgcttaggttctctaatctgtgtaactgctgcttttggtgtactcttatctaattttggtgctccttcttattgtaatggcgttagagaattgtatcttaattcgtctaacgttactactatggatttctgtgaaggttcttttccttgcagcatttgtttaagtggattagactcccttgattcttatccagctcttgaaaccattcaggtgacgatttcatcgtacaagctagacttgacaattttaggtctggccgctgagtgggttttggcatatatgttgttcacaaaattcttttatttattaggtctttcagctataatgcaggtgttctttggctattttgctagtcatttcatcagcaattcttggctcatgtggtttatcattagtattgtacaaatggcacccgtttctgcaatggttaggatgtacatcttctttgcttctttctactacatatggaagagctatgttcatatcatggatggttgcacctcttcgacttgcatgatgtgctataagcgcaatcgtgccacacgcgttgagtgtacaactattgttaatggcatgaagagatctttctatgtctatgcaaatggaggccgtggcttctgcaagactcacaattggaattgtctcaattgtgacacattttgcactggtagtacattcattagtgatgaagttgctcgtgatttgtcactccagtttaaaagaccaatcaaccctactgaccagtcatcgtatattgttgatagtgttgctgtgaaaaatggcgcgcttcacctctactttgacaaggctggtcaaaagacctatgagagacatccgctctcccattttgtcaatttagacaatttgagagctaacaacactaaaggttcactgcctattaatgtcatagtttttgatggcaagtccaaatgcgacgagtctgcttctaagtctgcttctgtgtactacagtcagctgatgtgccaacctattctgttgcttgaccaagctcttgtatcagacgttggagatagtactgaagtttccgttaagatgtttgatgcttatgtcgacaccttttcagcaacttttagtgttcctatggaaaaacttaaggcacttgttgctacagctcacagcgagttagcaaagggtgtagctttagatggtgtcctttctacattcgtgtcagctgcccgacaaggtgttgttgataccgatgttgacacaaaggatgttattgaatgtctcaaactttcacatcactctgacttagaagtgacaggtgacagttgtaacaatttcatgctcacctataataaggttgaaaacatgacgcccagagatcttggcgcatgtattgactgtaatgcaaggcatatcaatgcccaagtagcaaaaagtcacaatgtttcactcatctggaatgtaaaagactacatgtctttatctgaacagctgcgtaaacaaattcgtagtgctgccaagaagaacaacataccttttagactaacttgtgctacaactagacaggttgtcaatgtcataactactaaaatctcactcaagggtggtaagattgttagtacttgttttaaacttatgcttaaggccacattattgtgcgttcttgctgcattggtttgttatatcgttatgccattacatacattgtcaatccatgatggttacacaaatgaaatcattggttacaaagccattcaggatggtgtcactcgtgacatcatttctactgatgattgttttgcaaataaacatgctggttttgacgcatggtttagccagcgtggtggttcatacaaaaatgacaaaagctgccctgtagtagctgctatcattacaagagagattggtttcatagtgcctggcttaccgggtactgtgctgagagcaatcaatggtgacttcttgcattttctacctcgtgtttttagtgctgttggcaacatttgctacacaccttccaaactcattgagtatagtgattttgctacctctgcttgcgttcttgctgctgagtgtacaatttttaaggatgctatgggcaaacctgtgccatattgttatgacactaatttgctagagggttctatttcttatagtgagcttcgtccagacactcgttatgtgcttatggatggttccatcatacagtttcctaacacttacctggagggttctgttagagtagtaacaacttttgatgctgagtactgtagacatggtacatgcgaaaggtcagaagtaggtatttgcctatctaccagtggtagatgggttcttaataatgagcattacagagctctatcaggagttttctgtggtgttgatgcgatgaatctcatagctaacatctttactcctcttgtgcaacctgtgggtgctttagatgtgtctgcttcagtagtggctggtggtattattgccatattggtgacttgtgctgcctactactttatgaaattcagacgtgcttttggtgagtacaaccatgttgttgctgctaatgcacttttgtttttgatgtctttcactatactctgtctggtaccagcttacagctttctgccgggagtctactcagtcttttacttgtacttgacattctatttcaccaatgatgtttcattcttggctcaccttcaatggtttgccatgttttctcctattgtgcctttttggataacagcaatctatgtattctgtatttctctgaagcactgccattggttctttaacaactatcttaggaaaagagtcatgtttaatggagttacatttagtaccttcgaggaggctgctttgtgtacctttttgctcaacaaggaaatgtacctaaaattgcgtagcgagacactgttgccacttacacagtataacaggtatcttgctctatataacaagtacaagtatttcagtggagtcttagatactaccagctatcgtgaagcagcttgctgccacttagcaaaggctctaaatgactttagcaactcaggtgctgatgttctctaccaaccaccacagacatcaatcacttctgctgttctgcagagtggttttaggaaaatggcattcccgtcaggcaaagttgaagggtgcatggtacaagtaacctgtggaactacaactcttaatggattgtggttggatgacacagtatactgtccaagacatgtcatttgcacagcagaagacatgcttaatcctaactatgaagatctgctcattcgcaaatccaaccatagctttcttgttcaggctggcaatgttcaacttcgtgttattggccattctatgcaaaattgtctgcttaggcttaaagttgatacttctaaccctaagacacccaagtataaatttgtccgtatccaacctggtcaaacattttcagttctagcatgctacaatggttcaccatctggtgtttatcagtgtgccatgagacctaatcataccattaaaggttctttccttaatggatcatgtggtagtgttggttttaacattgattatgattgcgtgtctttctgctatatgcatcatatggagcttccaacaggagtacacgctggtactgacttagaaggtaaattctatggtccatttgttgacagaccaactgcacaggctgcaggtacagacacaaccataacattaaatgttttggcatggctgtatgctgctgttatcaatggtgataggtggtttcttaatagattcaccactactttgaatgactttaaccttgtggcaatgaagtacaactatgaacctttgacacaagatcatgttgacatattgggacctctttctgctcaaacaggaattgccgtcttagatatgtgtgctgctttgaaagagctgctgcagaatggtatgaatggtcgtactatccttggtagcactattttagaagatgagtttacaccatttgatgttgttagacaatgctctggtgttaccttccaaggtaagttcaagaaaattgttaagggcactcatcattggatgcttttaactttcttgacatcactattgattcttgttcaaagtacacagtggtcactgtttttctttgtttacgagaatgctttcttgccatttactcttggtattatggcaattgctgcatgtgctatgctgcttgttaagcataagcacgcattcttgtgcttgtttctgttaccttctcttgcaacagttgcttactttaatatggtctacatgcctgctagctgggtgatgcgtatcatgacatggcttgaattggctgacactagcttgtctggttataggcttaaggattgtgttatgtatgcttcagctttagttttgcttattctcatgacagctcgcactgtttatgatgatgctgctagacgtgtttggacactgatgaatgtcattacacttgtttacaaagtctactatggtaatgctttagatcaagctatttccatgtgggccttagttatttctgtaacctctaactattctggtgtcgttacgactatcatgtttttagctagagctatagtgtttgtgtgtgttgagtattacccattgttatttattactggcaacaccttacagtgtatcatgcttgtttattgtttcttaggctattgttgctgctgctactttggccttttctgtttactcaaccgttacttcaggcttactcttggtgtttatgactacttggtctctacacaagaatttaggtatatgaactcccaggggcttttgcctcctaagagtagtattgatgctttcaagcttaacattaagttgttgggtattggaggtaaaccatgtatcaaggttgctactgtacagtctaaaatgtctgacgtaaagtgcacatctgtggtactgctctcggttcttcaacaacttagagtagagtcatcttctaaattgtgggcacaatgtgtacaactccacaatgatattcttcttgcaaaagacacaactgaagctttcgagaagatggtttctcttttgtctgttttgctatccatgcagggtgctgtagactttaataggttgtgcgaggaaatgctcgataaccgtgctactcttcaggctattgcttcagaatttagttctttaccatcatatgccgcttatgccactgcccaggaggcctatgagcaggctgtagctaatggtgattctgaagtcgttctcaaaaagttaaagaaatctttgaatgtggctaaatctgagtttgaccgtgatgctgccatgcaacgcaagttggaaaagatggcagatcaggctatgacccaaatgtacaaacaggcaagatctgaggacaagagggcaaaagtaactagtgctatgcaaacaatgctcttcactatgcttaggaagcttgataatgatgcacttaacaacattatcaacaatgcgcgtgatggttgtgttccactcaacatcataccattgactacagcagccaaactcatggttgttgtccctgattatggtacctacaagaacacttgtgatggtaacacctttacatatgcatctgcactctgggaaatccagcaagttgttgatgcggatagcaagattgttcaacttagtgaaattaacatggacaattcaccaaatttggcttggcctcttattgttacagctctaagagccaactcagctgttaaactacagaataatgaactgagtccagtagcactacgacagatgtcctgtgcggctggtaccacacaaacagcttgtactgatgacaatgcacttgcctactataacaattcgaagggaggtaggtttgtgctggcattactatcagaccaccaagatctcaaatgggctagattccctaagagtgatggtacaggtacaatttacacagaactggaaccaccttgtaggtttgttacagacacaccaaaagggcctaaagtgaaatacttgtacttcatcaaaggcttaaacaacctaaatagaggtatggtgctgggcagtttagctgctacagtacgtcttcaggctggaaatgctacagaagtacctgccaattcaactgtgctttccttctgtgcttttgcagtagaccctgctaaagcatataaggattacctagcaagtggaggacaaccaatcaccaactgtgtgaagatgttgtgtacacacactggtacaggacaggcaattactgtaacaccagaagctaacatggaccaagagtcctttggtggtgcttcatgttgtctgtattgtagatgccacattgaccatccaaatcctaaaggattctgtgacttgaaaggtaagtacgtccaaatacctaccacttgtgctaatgacccagtgggttttacacttagaaacacagtctgtaccgtctgcggaatgtggaaaggttatggctgtagttgtgaccaactccgcgaacccttgatgcagtctgcggatgcatcaacgtttttaaacgggtttgcggtgtaagtgcagcccgtcttacaccgtgcggcacaggcactagtactgatgtcgtctacagggcttttgatatttacaacgaaaaagttgctggttttgcaaagttcctaaaaactaattgctgtcgcttccaggagaaggatgaggaaggcaatttattagactcttactttgtagttaagaggcatactatgtctaactaccaacatgaagagactatttataacttggttaaagattgtccagcggttgctgtccatgactttttcaagtttagagtagatggtgacatggtaccacatatatcacgtcagcgtctaactaaatacacaatggctgatttagtctatgctctacgtcattttgatgagggtaattgtgatacattaaaagaaatactcgtcacatacaattgctgtgatgatgattatttcaataagaaggattggtatgacttcgtagagaatcctgacatcttacgcgtatatgctaacttaggtgagcgtgtacgccaatcattattaaagactgtacaattctgcgatgctatgcgtgatgcaggcattgtaggcgtactgacattagataatcaggatcttaatgggaactggtacgatttcggtgatttcgtacaagtagcaccaggctgcggagttcctattgtggattcatattactcattgctgatgcccatcctcactttgactagggcattggctgctgagtcccatatggatgctgatctcgcaaaaccacttattaagtgggatttgctgaaatatgattttacggaagagagactttgtctcttcgaccgttattttaaatattgggaccagacataccatcccaattgtattaactgtttggatgataggtgtatccttcattgtgcaaactttaatgtgttattttctactgtgtttccacctacaagttttggaccactagtaagaaaaatatttgtagatggtgttccttttgttgtttcaactggataccattttcgtgagttaggagtcgtacataatcaggatgtaaacttacatagctcgcgtctcagtttcaaggaacttttagtgtatgctgctgatccagctatgcatgcagcttctggcaatttattgctagataaacgcactacatgcttttcagtagctgcactaacaaacaatgttgcttttcaaactgtcaaacccggtaattttaataaagacttttatgactttgctgtgtctaaaggtttctttaaggaaggaagttctgttgaactaaaacacttcttctttgctcaggatggcaacgctgctatcagtgattatgactattatcgttataatctgccaacaatgtgtgatatcagacaactcctattcgtagttgaagttgttgataaatactttgattgttacgatggtggctgtattaatgccaaccaagtaatcgttaacaatctggataaatcagctggtttcccatttaataaatggggtaaggctagactttattatgactcaatgagttatgaggatcaagatgcacttttcgcgtatactaagcgtaatgtcatccctactataactcaaatgaatcttaagtatgccattagtgcaaagaatagagctcgcaccgtagctggtgtctctatctgtagtactatgacaaatagacagtttcatcagaaattattgaagtcaatagccgccactagaggagctactgtggtaattggaacaagcaagttttacggtggctggcataatatgttaaaaactgtttacagtgatgtagaaactccacaccttatgggttgggattatccaaaatgtgacagagccatgcctaacatgcttaggataatggcctctcttgttcttgctcgcaaacataacacttgctgtaacttatcacaccgtttctacaggttagctaacgagtgtgcgcaagtattaagtgagatggtcatgtgtggcggctcactatatgttaaaccaggtggaacatcatccggtgatgctacaactgcttatgctaatagtgtctttaacatttgtcaagctgttacagccaatgtaaatgcacttctttcaactgatggtaataagatagctgacaagtatgtccgcaatctacaacacaggctctatgagtgtctctatagaaatagggatgttgatcatgaattcgtggatgagttttacgcttacctgcgtaaacatttctccatgatgattctttctgatgatgccgttgtgtgctataacagtaactatgcggctcaaggtttagtagctagcattaagaactttaaggcagttctttattatcaaaataatgtgttcatgtctgaggcaaaatgttggactgagactgaccttactaaaggacctcacgaattttgctcacagcatacaatgctagttaaacaaggagatgattacgtgtacctgccttacccagatccatcaagaatattaggcgcaggctgttttgtcgatgatattgtcaaaacagatggtacacttatgattgaaaggttcgtgtcactggctattgatgcttacccacttacaaaacatcctaatcaggagtatgctgatgtctttcacttgtatttacaatacattagaaagttacatgatgagcttactggccacatgttggacatgtattccgtaatgctaactaatgataacacctcacggtactgggaacctgagttttatgaggctatgtacacaccacatacagtcttgcaggctgtaggtgcttgtgtattgtgcaattcacagacttcacttcgttgcggtgcctgtattaggagaccattcctatgttgcaagtgctgctatgaccatgtcatttcaacatcacacaaattagtgttgtctgttaatccctatgtttgcaatgccccaggttgtgatgtcactgatgtgacacaactgtatctaggaggtatgagctattattgcaagtcacataagcctcccattagttttccattatgtgctaatggtcaggtttttggtttatacaaaaacacatgtgtaggcagtgacaatgtcactgacttcaatgcgatagcaacatgtgattggactaatgctggcgattacatacttgccaacacttgtactgagagactcaagcttttcgcagcagaaacgctcaaagccactgaggaaacatttaagctgtcatatggtattgccactgtacgcgaagtactctctgacagagaattgcatctttcatgggaggttggaaaacctagaccaccattgaacagaaactatgtctttactggttaccgtgtaactaaaaatagtaaagtacagattggagagtacacctttgaaaaaggtgactatggtgatgctgttgtgtacagaggtactacgacatacaagttgaatgttggtgattactttgtgttgacatctcacactgtaatgccacttagtgcacctactctagtgccacaagagcactatgtgagaattactggcttgtacccaacactcaacatctcagatgagttttctagcaatgttgcaaattatcaaaaggtcggcatgcaaaagtactctacactccaaggaccacctggtactggtaagagtcattttgccatcggacttgctctctattacccatctgctcgcatagtgtatacggcatgctctcatgcagctgttgatgccctatgtgaaaaggcattaaaatatttgcccatagataaatgtagtagaatcatacctgcgcgtgcgcgcgtagagtgttttgataaattcaaagtgaattcaacactagaacagtatgttttctgcactgtaaatgcattgccagaaacaactgctgacattgtagtctttgatgaaatctctatggctactaattatgacttgagtgttgtcaatgctagacttcgtgcaaaacactacgtctatattggcgatcctgctcaattaccagccccccgcacattgctgactaaaggcacactagaaccagaatattttaattcagtgtgcagacttatgaaaacaataggtccagacatgttccttggaacttgtcgccgttgtcctgctgaaattgttgacactgtgagtgctttagtttatgacaataagctaaaagcacacaaggagaagtcagctcaatgcttcaaaatgttctacaaaggtgttattacacatgatgtttcatctgcaatcaacagacctcaaataggcgttgtaagagaatttcttacacgcaatcctgcttggagaaaagctgtttttatctcaccttataattcacagaacgctgtagcttcaaaaatcttaggattgcctacgcagactgttgattcatcacagggttctgaatatgactatgttatattcacacaaactactgaaacagcacactcttgtaatgtcaaccgcttcaatgtggctatcacaagggcaaaaattggcattttgtgcataatgtctgatagagatctttatgacaaactgcaatttacaagtctagaaataccacgtcgcaatgtggctacattacaagcagaaaatgtaactggactttttaaggactgtagtaagatcattactggtcttcatcctacacaggcacctacacacctcagcgttgatataaagttcaagactgaaggattatgtgttgacataccaggcataccaaaggacatgacctaccgtagactcatctctatgatgggtttcaaaatgaattaccaagtcaatggttaccctaatatgtttatcacccgcgaagaagctattcgtcacgttcgtgcgtggattggctttgatgtagagggctgtcatgcaactagagatgctgtgggtactaacctacctctccagctaggattttctacaggtgttaacttagtagctgtaccgactggttatgttgacactgaaaataacacagaattcaccagagttaatgcaaaacctccaccaggtgaccagtttaaacatcttataccactcatgtataaaggcttgccctggaatgtagtgcgtattaagatagtacaaatgctcagtgatacactgaaaggattgtcagacagagtcgtgttcgtcctttgggcgcatggctttgagcttacatcaatgaagtactttgtcaagattggacctgaaagaacgtgttgtctgtgtgacaaacgtgcaacttgcttttctacttcatcagatacttatgcctgctggaatcattctgtgggttttgactatgtctataacccatttatgattgatgttcagcagtggggctttacgggtaaccttcagagtaaccatgaccaacattgccaggtacatggaaatgcacatgtggctagttgtgatgctatcatgactagatgtttagcagtccatgagtgctttgttaagcgcgttgattggtctgttgaataccctattataggagatgaactgagggttaattctgcttgcagaaaagtacaacacatggttgtgaagtctgcattgcttgctgataagtttccagttcttcatgacattggaaatccaaaggctatcaagtgtgtgcctcaggctgaagtagaatggaagttctacgatgctcagccatgtagtgacaaagcttacaaaatagaggaactcttctattcttatgctacacatcacgataaattcactgatggtgtttgtttgttttggaattgtaacgttgatcgttacccagccaatgcaattgtgtgtaggtttgacacaagagtcttgtcaaacttgaacttaccaggctgtgatggtggtagtttgtatgtgaataagcatgcattccacactccagctttcgataaaagtgcatttactaatttaaagcaattgcctttcttttactattctgatagtccttgtgagtctcatggcaaacaagtagtgtcggatattgattatgttccactcaaatctgctacgtgtattacacgatgcaatttaggtggtgctgtttgcagacaccatgcaaatgagtaccgacagtacttggatgcatataatatgatgatttctgctggatttagcctatggatttacaaacaatttgatacttataacctgtggaatacatttaccaggttacagagtttagaaaatgtggcttataatgttgttaataaaggacactttgatggacacgccggcgaagcacctgtttccatcattaataatgctgtttacacaaaggtagatggtattgatgtggagatctttgaaaataagacaacacttcctgttaatgttgcatttgagctttgggctaagcgtaacattaaaccagtgccagagattaagatactcaataatttgggtgttgatatcgctgctaatactgtaatctgggactacaaaagagaagccccagcacatgtgtctacaataggtgtctgcacaatgactgacattgccaagaaacctactgagagtgcttgttcttcacttactgtcttgtttgatggtagagtggaaggacaggtagacctttttagaaacgcccgtaatggtgttttaataacagaaggttcagtcaaaggtctaacaccttcaaagggaccagcacaagctagcgtcaatggagtcacattaattggagaatcagtaaaaacacagtttaactactttaagaaagtagacggcattattcaacagttgcctgaaacctactttactcagagcagagacttagaggattttaagcccagatcacaaatggaaactgactttctcgagctcgctatggatgaattcatacagcgatataagctcgagggctatgccttcgaacacatcgtttatggagatttcagtcatggacaacttggcggtcttcatttaatgataggcttagccaagcgctcacaagattcaccacttaaattagaggattttatccctatggacagcacagtgaaaaattacttcataacagatgcgcaaacaggttcatcaaaatgtgtgtgttctgtgattgatcttttacttgatgactttgtcgagataataaagtcacaagatttgtcagtgatttcaaaagtggtcaaggttacaattgactatgctgaaatttcattcatgctttggtgtaaggatggacatgttgaaaccttctacccaaaactacaagcaagtcaagcgtggcaaccaggtgttgcgatgcctaacttgtacaagatgcaaagaatgcttcttgaaaagtgtgaccttcagaattatggtgaaaatgctgttataccaaaaggaataatgatgaatgtcgcaaagtatactcaactgtgtcaatacttaaatacacttactttagctgtaccctacaacctgagagttattcactttggtgctggctctgataaaggagttgcaccaggtacagctgtgctcagacaatggttgcccactggcacactacttgtcgattcagatcttaatgacttcgtctccgacgcagattctactttaattggagactgtgcaacagtacatacggctaataaatgggaccttattattagcgatatgtatgaccctaggaccaaacatgtgacaaaagagaatgactctaaagaagggtttttcacttatctgtgtggatttataaagcaaaaactagccctgggtggttctatagctgtaaagataacagagcattcttggaatgctgacctttacaagcttatgggccatttctcatggtggacagcttttgttacaaatgtaaatgcatcatcatcggaagcatttttaattggggctaactatcttggcaagccgaaggaacaaattgatggctataccatgcatgctaactacattttctggaggaacacaaatcctatccagttgtcttcctattcactctttgacatgagcaaatttcctcttaaattaagaggaactgctgtaatgtctcttaaggagaatcaaatcaatgatatgatttattctcttctggaaaaaggtaggcttatcattagagaaaacaacagagttgtggtttcaagtgatattcttgttaacaactaaacaaacatgtttattttcttattatttcttactctcactagtggtagtgaccttgaccggtgcaccacttttgatgatgttcaagctcctaattacactcaacatacttcatctatgaggggggtttactatcctgatgaaatttttagatccgacactctttatttaactcaggatttatttcttccattttattctaatgttacagggtttcatactattaatcatacgtttgacaaccctgtcataccttttaaggatggtatttattttgctgccacagagaaatcaaatgttgtccgtggttgggtttttggttctaccatgaacaacaagtcacagtcggtgattattattaacaattctactaatgttgttatacgagcatgtaactttgaattgtgtgacaaccctttctttgctgtttctaaacccatgggtacacagacacatactatgatattcgataatgcatttaattgcactttcgagtacatatctgatgccttttcgcttgatgtttcagaaaagtcaggtaattttaaacacttacgagagtttgtgtttaaaaataaagatgggtttctctatgtttataagggctatcaacctatagatgtagttcgtgatctaccttctggttttaacactttgaaacctatttttaagttgcctcttggtattaacattacaaattttagagccattcttacagccttttcacctgctcaagacacttggggcacgtcagctgcagcctattttgttggctatttaaagccaactacatttatgctcaagtatgatgaaaatggtacaatcacagatgctgttgattgttctcaaaatccacttgctgaactcaaatgctctgttaagagctttgagattgacaaaggaatttaccagacctctaatttcagggttgttccctcaagagatgttgtgagattccctaatattacaaacttgtgtccttttggagaggtttttaatgctactaaattcccttctgtctatgcatgggagaggaaaaaaatttctaattgtgttgctgattactctgtgctctacaactcaacatttttttcaacctttaagtgctatggcgtttctgccactaagttgaatgatctttgcttctccaatgtctatgcagattcttttgtagtcaagggagatgatgtaagacaaatagcgccaggacaaactggtgttattgctgattataattataaattgccagatgatttcatgggttgtgtccttgcttggaatactaggaacattgatgctacttcaactggtaattataattataaatataggtatcttagacatggcaagcttaggccctttgagagagacatatctaatgtgcctttctcccctgatggcaaaccttgcaccccacctgctcttaattgttattggccattaaatgattatggtttttacaccactactggcattggctaccaaccttacagagttgtagtactttcttttgaacttttaaatgcaccggccacggtttgtggaccaaaattatccactgaccttattaagaaccagtgtgtcaattttaattttaatggactcactggtactggtgtgttaactccttcttcaaagagatttcaaccatttcaacaatttggccgtgatgtttctgatttcactgattccgttcgagatcctaaaacatctgaaatattagacatttcaccttgctcttttgggggtgtaagtgtaattacacctggaacaaatgcttcatctgaagttgctgttctatatcaagatgttaactgcactgatgtttctacagcaattcatgcagatcaactcacaccagcttggcgcatatattctactggaaacaatgtattccagactcaagcaggctgtcttataggagctgagcatgtcgacacttcttatgagtgcgacattcctattggagctggcatttgtgctagttaccatacagtttctttattacgtagtactagccaaaaatctattgtggcttatactatgtctttaggtgctgatagttcaattgcttactctaataacaccattgctatacctactaacttttcaattagcattactacagaagtaatgcctgtttctatggctaaaacctccgtagattgtaatatgtacatctgcggagattctactgaatgtgctaatttgcttctccaatatggtagcttttgcacacaactaaatcgtgcactctcaggtattgctgctgaacaggatcgcaacacacgtgaagtgttcgctcaagtcaaacaaatgtacaaaaccccaactttgaaatattttggtggttttaatttttcacaaatattacctgaccctctaaagccaactaagaggtcttttattgaggacttgctctttaataaggtgacactcgctgatgctggcttcatgaagcaatatggcgaatgcctaggtgatattaatgctagagatctcatttgtgcgcagaagttcaatggacttacagtgttgccacctctgctcactgatgatatgattgctgcctacactgctgctctagttagtggtactgccactgctggatggacatttggtgctggcgctgctcttcaaataccttttgctatgcaaatggcatataggttcaatggcattggagttacccaaaatgttctctatgagaaccaaaaacaaatcgccaaccaatttaacaaggcgattagtcaaattcaagaatcacttacaacaacatcaactgcattgggcaagctgcaagacgttgttaaccagaatgctcaagcattaaacacacttgttaaacaacttagctctaattttggtgcaatttcaagtgtgctaaatgatatcctttcgcgacttgataaagtcgaggcggaggtacaaattgacaggttaattacaggcagacttcaaagccttcaaacctatgtaacacaacaactaatcagggctgctgaaatcagggcttctgctaatcttgctgctactaaaatgtctgagtgtgttcttggacaatcaaaaagagttgacttttgtggaaagggctaccaccttatgtccttcccacaagcagccccgcatggtgttgtcttcctacatgtcacgtatgtgccatcccaggagaggaacttcaccacagcgccagcaatttgtcatgaaggcaaagcatacttccctcgtgaaggtgtttttgtgtttaatggcacttcttggtttattacacagaggaacttcttttctccacaaataattactacagacaatacatttgtctcaggaaattgtgatgtcgttattggcatcattaacaacacagtttatgatcctctgcaacctgagcttgactcattcaaagaagagctggacaagtacttcaaaaatcatacatcaccagatgttgatcttggcgacatttcaggcattaacgcttctgtcgtcaacattcaaaaagaaattgaccgcctcaatgaggtcgctaaaaatttaaatgaatcactcattgaccttcaagaattgggaaaatatgagcaatatattaaatggccttggtatgtttggctcggcttcattgctggactaattgccatcgtcatggttacaatcttgctttgttgcatgactagttgttgcagttgcctcaagggtgcatgctcttgtggttcttgctgcaagtttgatgaggatgactctgagccagttctcaagggtgtcaaattacattacacataaacgaacttatggatttgtttatgagattttttactcttgaatcaattactgcacagccagtaaaaattgacaatgcttctcctgcaagtactgttcatgctacagcaacgataccgctacaagcctcactccctttcggatggcttgttattggcgttgcatttcttgctgtttttcagagcgctaccaaaataattgcgctcaataaaagatggcagctagccctttataagggcttccagttcatttgcaatttactgctgctatttgttaccatctattcacatcttttgcttgtcgctgcaggtatggaggcgcaatttttgtacctctatgccttgatatattttctacaatgcatcaacgcatgtagaattattatgagatgttggctttgttggaagtgcaaatccaagaacccattactttatgatgccaactactttgtttgctggcacacacataactatgactactgtataccatataacagtgtcacagatacaattgtcgttactgaaggtgacggcatttcaacaccaaaactcaaagaagactaccaaattggtggttattctgaggataggcactcaggtgttaaagactatgtcgttgtacatggctatttcaccgaagtttactaccagcttgagtctacacaaattactacagacactggtattgaaaatgctacattcttcatctttaacaagcttgttaaagatccaccgaatgtgcaaatacacacaatcgacggctcttcaggagttgctaatccagcaatggatccaatttatgatgagccgacgacgactactagcgtgcctttgtaagcacaagaaagtgagtacgaacttatgtactcattcgtttcggaagaaacaggtacgttaatagttaatagcgtacttctttttcttgctttcgtggtattcttgctagtcacactagccatccttactgcgcttcgattgtgtgcgtactgctgcaatattgttaacgtgagtttagtaaaaccaacggtttacgtctactcgcgtgttaaaaatctgaactcttctgaaggagttcctgatcttctggtctaaacgaactaactattattattattctgtttggaactttaacattgcttatcatggcagacaacggtactattaccgttgaggagcttaaacaactcctggaacaatggaacctagtaataggtttcctattcctagcctggattatgttactacaatttgcctattctaatcggaacaggtttttgtacataataaagcttgttttcctctggctcttgtggccagtaacacttgcttgttttgtgcttgctgctgtctacagaattaattgggtgactggcgggattgcgattgcaatggcttgtattgtaggcttgatgtggcttagctacttcgttgcttccttcaggctgtttgctcgtacccgctcaatgtggtcattcaacccagaaacaaacattcttctcaatgtgcctctccgggggacaattgtgaccagaccgctcatggaaagtgaacttgtcattggtgctgtgatcattcgtggtcacttgcgaatggccggacactccctagggcgctgtgacattaaggacctgccaaaagagatcactgtggctacatcacgaacgctttcttattacaaattaggagcgtcgcagcgtgtaggcactgattcaggttttgctgcatacaaccgctaccgtattggaaactataaattaaatacagaccacgccggtagcaacgacaatattgctttgctagtacagtaagtgacaacagatgtttcatcttgttgacttccaggttacaatagcagagatattgattatcattatgaggactttcaggattgctatttggaatcttgacgttataataagttcaatagtgagacaattatttaagcctctaactaagaagaattattcggagttagatgatgaagaacttatggagttagattatccataaaacgaacatgaaaattattctcttcctgacattgattgtatttacatcttgcgagctatatcactatcaggagtgtgttagaggtacgactgtactactaaaagaaccttgcccatcaggaacatacgagggcaattcaccatttcaccctcttgctgacaataaatttgcactaacttgcactagcacacactttgcttttgcttgtgctgacggtactcgacatacctatcagctgcgtgcaagatcagtttcaccaaaacttttcatcagacaagaggaggttcaacaagagctctactcgccactttttctcattgttgctgctctagtatttttaatactttgcttcaccattaagagaaagacagaatgaatgagctcactttaattgacttctatttgtgctttttagcctttctgctattccttgttttaataatgcttattatattttggttttcactcgaaatccaggatctagaagaaccttgtaccaaagtctaaacgaacatgaaacttctcattgttttgacttgtatttctctatgcagttgcatacgcactgtagtacagcgctgtgcatctaataaacctcatgtgcttgaagatccttgtaaggtacaacactaggggtaatacttatagcactgcttggctttgtgctctaggaaaggttttaccttttcatagatggcacactatggttcaaacatgcacacctaatgttactatcaactgtcaagatccagctggtggtgcgcttatagctaggtgttggtaccttcatgaaggtcaccaaactgctgcatttagagacgtacttgttgttttaaataaacgaacaaattaaaatgtctgataatggaccccaatcaaaccaacgtagtgccccccgcattacatttggtggacccacagattcaactgacaataaccagaatggaggacgcaatggggcaaggccaaaacagcgccgaccccaaggtttacccaataatactgcgtcttggttcacagctctcactcagcatggcaaggaggaacttagattccctcgaggccagggcgttccaatcaacaccaatagtggtccagatgaccaaattggctactaccgaagagctacccgacgagttcgtggtggtgacggcaaaatgaaagagctcagccccagatggtacttctattacctaggaactggcccagaagcttcacttccctacggcgctaacaaagaaggcatcgtatgggttgcaactgagggagccttgaatacacccaaagaccacattggcacccgcaatcctaataacaatgctgccaccgtgctacaacttcctcaaggaacaacattgccaaaaggcttctacgcagagggaagcagaggcggcagtcaagcctcttctcgctcctcatcacgtagtcgcggtaattcaagaaattcaactcctggcagcagtaggggaaattctcctgctcgaatggctagcggaggtggtgaaactgccctcgcgctattgctgctagacagattgaaccagcttgagagcaaagtttctggtaaaggccaacaacaacaaggccaaactgtcactaagaaatctgctgctgaggcatctaaaaagcctcgccaaaaacgtactgccacaaaacagtacaacgtcactcaagcatttgggagacgtggtccagaacaaacccaaggaaatttcggggaccaagacctaatcagacaaggaactgattacaaacattggccgcaaattgcacaatttgctccaagtgcctctgcattctttggaatgtcacgcattggcatggaagtcacaccttcgggaacatggctgacttatcatggagccattaaattggatgacaaagatccacaattcaaagacaacgtcatactgctgaacaagcacattgacgcatacaaaacattcccaccaacagagcctaaaaaggacaaaaagaaaaagactgatgaagctcagcctttgccgcagagacaaaagaagcagcccactgtgactcttcttcctgcggctgacatggatgatttctccagacaacttcaaaattccatgagtggagcttctgctgattcaactcaggcataaacactcatgatgaccacacaaggcagatgggctatgtaaacgttttcgcaattccgtttacgatacatagtctactcttgtgcagaatgaattctcgtaactaaacagcacaagtaggtttagttaactttaatctcacatagcaatctttaatcaatgtgtaacattagggaggacttgaaagagccaccacattttcatcgaggccacgcggagtacgatcgagggtacagtgaataatgctagggagagctgcctatatggaagagccctaatgtgtaaaattaattttagtagtgctatccccatgtgattttaatagcttcttaggagaatgacaaaaaaaaaaaaaaaaaa

SEQ ID NO: 29769 - DNA, 29757 bp, SARS Coronavirus
tacccaggaaaagccaaccaacctcgatctcttgtagatctgttctctaaacgaactttaaaatctgtgtagctgtcgctcggctgcatgcctagtgcacctacgcagtataaacaataataaattttactgtcgttgacaagaaacgagtaactcgtccctcttctgcagactgcttacggtttcgtccgtgttgcagtcgatcatcagcatacctaggtttcgtccgggtgtgaccgaaaggtaagatggagagccttgttcttggtgtcaacgagaaaacacacgtccaactcagtttgcctgtccttcaggttagagacgtgctagtgcgtggcttcggggactctgtggaagaggccctatcggaggcacgtgaacacctcaaaaatggcacttgtggtctagtagagctggaaaaaggcgtactgccccagcttgaacagccctatgtgttcattaaacgttctgatgccttaagcaccaatcactgccacaaggtcgttgagctggttgcagaaatggacggcattcagtacggtcgtagcggtataacactgggagtactcgtgccacatgtgggcgaaaccccaattgcataccgcaatgttcttcttcgtaagaacggtaataagagagccggtggtcatagctatggcatcgatctaaagtcttatgacttaggtgacgagcttggcactgatcccattgaagattatgaacaaaactggaacactaagcatggcagtggtgcactccgtgaactcactcgtgagctcaatggaggtgcagtcactcgctatgtcgacaacaatttctgtggcccagatgggtaccctcttgattgcatcaaagattttctcgcacgcgcgggcaagtcaatgtgcactctttccgaacaacttgattacatcgagtcgcagagaggtgtctactgctgccgtgaccatgagcatgaaattgcctggttcactgagcgctctgataagagctacgagcaccagacacccttcgaaattaagagtgccaagaaatttgacactttcaaaggggaatgcccaaagtttgtgtttcctcttaactcaaaagtcaaagtcattcaaccacgtgttgaaaagaaaaagactgagggtttcatggggcgtatacgctctgtgtaccctgttgcatctccacaggagtgtaacaatatgcacttgtctaccttgatgaaatgtaatcattgcgatgaagtttcatggcagacgtgcgactttctgaaagccacttgtgaacattgtggcactgaaaatttagttattgaaggacctactacatgtgggtacctacctactaatgctgtagtgaaaatgccatgtcctgcctgtcaagacccagagattggacctgagcatagtgttgcagattatcacaaccactcaaacattgaaactcgactccgcaagggaggtaggactagatgttttggaggctgtgtgtttgcctatgttggctgctataataagcgtgcctactgggttcctcgtgctagtgctgatattggctcaggccatactggcattactggtgacaatgtggagaccttgaatgaggatctccttgagatactgagtcgtgaacgtgttaacattaacattgttggcgattttcatttgaatgaagaggttgccatcattttggcatctttctctgcttctacaagtgcctttattgacactataaagagtcttgattacaagtctttcaaaaccattgttgagtcctgcggtaactataaagttaccaagggaaagcccgtaaaaggtgcttggaacattggacaacagagatcagttttaacaccactgtgtggttttccctcacaggctgctggtgttatcagatcaatttttgcgcgcacacttgatgcagcaaaccactcaattcctgatttgcaaagagcagctgtcaccatacttgatggtatttctgaacagtcattacgtcttgtcgacgccatggtttatacttcagacctgctcaccaacagtgtcattattatggcatatgtaactggtggtcttgtacaacagacttctcagtggttgtctaatcttttgggcactactgttgaaaaactcaggcctatctttgaatggattgaggcgaaacttagtgcaggagttgaatttctcaaggatgcttgggagattctcaaatttctcattacaggtgtttttgacatcgtcaagggtcaaatacaggttgcttcagataacatcaaggattgtgtaaaatgcttcattgatgttgttaacaaggcactcgaaatgtgcattgatcaagtcactatcgctggcgcaaagttgcgatcactcaacttaggtgaagtcttcatcgctcaaagcaagggactttaccgtcagtgtatacgtggcaaggagcagctgcaactactcatgcctcttaaggcaccaaaagaagtaacctttcttgaaggtgattcacatgacacagtacttacctctgaggaggttgttctcaagaacggtgaactcgaagcactcgagacgcccgttgatagcttcacaaatggagctatcgttggcacaccagtctgtgtaaatggcctcatgctcttagagattaaggacaaagaacaatactgcgcattgtctcctggtttactggctacaaacaatgtctttcgcttaaaagggggtgcaccaattaaaggtgtaacctttggagaagatactgtttgggaagttcaaggttacaagaatgtgagaatcacatttgagcttgatgaacgtgttgacaaagtgcttaatgaaaagtgctctgtctacactgttgaatccggtaccgaagttactgagtttgcatgtgttgtagcagaggctgttgtgaagactttacaaccagtttctgatctccttaccaacatgggtattgatcttgatgagtggagtgtagctacattctacttatttgatgatgctggtgaagaaaacttttcatcacgtatgtattgttccttttaccctccagatgaggaagaagaggacgatgcagagtgtgaggaagaagaaattgatgaaacctgtgaacatgagtacggtacagaggatgattatcaaggtctccctctggaatttggtgcctcagctgaaacagttcgagttgaggaagaagaagaggaagactggctggatgatactactgagcaatcagagattgagccagaaccagaacctacacctgaagaaccagttaatcagtttactggttatttaaaacttactgacaatgttgccattaaatgtgttgacatcgttaaggaggcacaaagtgctaatcctatggtgattgtaaatgctgctaacatacacctgaaacatggtggtggtgtagcaggtgcactcaacaaggcaaccaatggtgccatgcaaaaggagagtgatgattacattaagctaaatggccctcttacagtaggagggtcttgtttgctttctggacataatcttgctaagaagtgtctgcatgttgttggacctaacctaaatgcaggtgaggacatccagcttcttaaggcagcatatgaaaatttcaattcacaggacaccttacttgcaccattgttgtcagcaggcatatttggtgctaaaccacttcagtctttacaagtgtgcgtgcagacggttcgtacacaggtttatattgcagtcaatgacaaagctctttatgagcaggttgtcatggattatcttgataacctgaagcctagagtggaagcacctaaacaagaggagccaccaaacacagaagattccaaaactgaggagaaatctgtcgtacagaagcctgtcgatgtgaagccaaaaattaaggcctgcattgatgaggttaccacaacactggaagaaactaagtttcttaccaataagttactcttgtttgctgatatcaatggtaagctttaccatgattctcagaacatgcttagaggtgaagatatgtctttccttgagaaggatgcaccttacatggtaggtgatgttatcactagtggtgatatcacttgtgttgtaataccctccaaaaaggctggtggcactactgagatgctctcaagagctttgaagaaagtgccagttgatgagtatataaccacgtaccctggacaaggatgtgctggttatacacttgaggaagctaggactgctcttaagaaatgcaaatctgcatcttatgtactaccttcagaagcacctaatgctaaggaagagattctaggaactgtatcctggaatttgagagaaatgcttgctcatgctgaagagacaagaaaattaatgcctatatgcatggatgttagagccataatggcaaccatccaacgtaagtataaaggaattaaaattcaagagggcatcgttgactatggtgtccgattcttcttttatactagtaaagagcctgtagcttctattattacgaagctgaactctctaaatgagccgcttgtcacaatgccaattggttatgtgacacatggttttaatcttgaagaggctgcgcgctgtatgcgttctcttaaagctcctgccgtagtgtcagtatcatcaccagatgctgttactacatataatggatacctcacttcgtcatcaaagacatctgaggagcactttgtagaaacagtttctttggctggctcttacagagattggtcctattcaggacagcgtacagagttaggtgttgaatttcttaagcgtggtgacaaaattgtgtaccacactctggagagccccgtcgagtttcatcttgacggtgaggttctttcacttgacaaactaaagagtctcttaaccctgcgggaggttaagactataaaagtgttcacaactgtggacaacactaatctccacacacagcttgtggatatgtctatgacatatggacagcagtttggtccaacatacttggatggtgctgatgttacaaaaattaaacctcatgtaaatcatgagggtaagactttctttgtactacctagtgatgacacactacgtagtgaagctttcgagtactaccatactcttgatgagagttttcttggtaggtacatgtctgctttaaaccacacaaagaaatggaaatttcctcaagttggtggtttaacttcaattaaatgggctgataacaattgttatttgtctagtgttttattagcacttcaacagcttgaagtcaaattcaatgcaccagcacttcaagaggcttattatagagcccgtgctggtgatgctgctaacttttgtgcactcatactcgcttacagtaataaaactgttggcgagcttggtgatgtcagagaaactatgacccatcttctacagcatgctaatttggaatctgcaaagcgagttcttaatgtggtgtgtaaacattgtggtcagaaaactactaccttaacgggtgtagaagctgtgatgtatatgggtactctatcttatgataatcttaagacaggtgtttccattccatgtgtgtgtggtcgtgatgctacacaatatctagtacaacaagagtcttcttttgttatgatgtctgcaccacctgctgagtataaattacagcaaggtacattcttatgtgcgaatgagtacactggtaactatcagtgtggtcattacactcatataactgctaaggagaccctctatcgtattgacggagctcaccttacaaagatgtcagagtacaaaggaccagtgactgatgttttctacaaggaaacatcttacactacaaccatcaagcctgtgtcgtataaactcgatggagttacttacacagagattgaaccaaaattggatgggtattataaaaaggataatgcttactatacagagcagcctatagaccttgtaccaactcaaccattaccaaatgcgagttttgataatttcaaactcacatgttctaacacaaaatttgctgatgatttaaatcaaatgacaggcttcacaaagccagcttcacgagagctatctgtcacattcttcccagacttgaatggcgatgtagtggctattgactatagacactattcagcgagtttcaagaaaggtgctaaattactgcataagccaattgtttggcacattaaccaggctacaaccaagacaacgttcaaaccaaacacttggtgtttacgttgtctttggagtacaaagccagtagatacttcaaattcatttgaagttctggcagtagaagacacacaaggaatggacaatcttgcttgtgaaagtcaacaacccacctctgaagaagtagtggaaaatcctaccatacagaaggaagtcatagagtgtgacgtgaaaactaccgaagttgtaggcaatgtcatacttaaaccatcagatgaaggtgttaaagtaacacaagagttaggtcatgaggatcttatggctgcttatgtggaaaacacaagcattaccattaagaaacctaatgagctttcactagccttaggtttaaaaacaattgccactcatggtattgctgcaattaatagtgttccttggagtaaaatttttgcttatgtcaaaccattcttaggacaagcagcaattacaacatcaaattgcgctaagagattagcacaacgtgtgtttaacaattatatgccttatgtgtttacattattgttccaattgtgtacttttactaaaagtaccaattctagaattagagcttcactacctacaactattgctaaaaatagtgttaagagtgttgctaaattatgtttggatgccggcattaattatgtgaagtcacccaaattttctaaattgttcacaatcgctatgtggctattgttgttaagtatttgcttaggttctctaatctatgtaactgctgcttttggtgtactcttatctaattttggtgctccttcttattgtaatggcgttagagaattgtatcttaattcgtctaacgttactactatggatttctgtgaaggttcttttccttgcagcatttgtttaagtggattagactcccttgattcttatccagctcttgaaaccattcaggtgacgatttcatcgtacaagctagacttgacaattttaggtctggccgctgagtgggttttggcatatatgttgttcacaaaattcttttatttattaggtctttcagctataatgcaggtgttctttggctattttgctagtcatttcatcagcaattcttggctcatgtggtttatcattagtattgtacaaatggcacccgtttctgcaatggttaggatgtacatcttctttgcttctttctactacatatggaagagctatgttcatatcatggatggttgcacctcttcgacttgcatgatgtgctataagcgcaatcgtgccacacgcgttgagtgtacaactattgttaatggcatgaagagatctttctatgtctatgcaaatggaggccgtggcttctgcaagactcacaattggaattgtctcaattgtgacacattttgcactggtagtacattcattagtgatgaagttgctcgtgatttgtcactccagtttaaaagaccaatcaaccctactgaccagtcatcgtatattgttgatagtgttgctgtgaaaaatggcgcgcttcacctctactttgacaaggctggtcaaaagacctatgagagacatccgctctcccattttgtcaatttagacaatttgagagctaacaacactaaaggttcactgcctattaatgtcatagtttttgatggcaagtccaaatgcgacgagtctgcttctaagtctgcttctgtgtactacagtcagctgatgtgccaacctattctgttgcttgaccaagctcttgtatcagacgttggagatagtactgaagttcccgttaagatgtttgatgcttatgtcgacaccttttcagcaacttttagtgttcctatggaaaaacttaaggcacttgttgctacagctcacagcgagttagcaaagggtgtagctttagatggtgtcctttctacattcgtgtcagctgcccgacaaggtgttgttgataccgatgttgacacaaaggatgttattgaatgtctcaaactttcacatcactctgacttagaagtgacaggtgacagttgtaacaatttcatgctcacctataataaggttgaaaacatgacgcccagagatcttggcgcatgtattgactgtaatgcaaggcatatcaatgcccaagtagcaaaaagtcacaatgtttcactcatctggaatgtaaaagactacatgtctttatctgaacagctgcgtaaacaaattcgtagtgctgccaagaagaacaacataccttttagactaacttgtgctacaactagacaggttgtcaatgtcataactactaaaatctcactcaagggtggtaagattgttagtacttgttttaaacttatgcttaaggccacattattgtgcgttcttgctgcattggtttgttacatcgttatgccagtacatacattgtcaatccatgatggttacacaaatgaaatcattggttacaaagccattcaggatggtgtcactcgtgacatcatttctactgatgattgttttgcaaataaacatgctggttttgacgcatggtttagccagcgtggtggttcatacaaaaatgacaaaagctgccctgtagtagctgctatcattacaagagagattggtttcatagtgcctggcttaccgggtactgtgttgagagcaatcaatggtgacttcttgcattttctacctcgtgtttttagtgctgttggcaacatttgctacacaccttccaaactcattgagtatagtgattttgctacctctgcttgcgttcttgctgcagagtgtacaatttttaaggatgctatgggcaaacctgtgccatattgttatgacactaatttgctagagggttctatttcttatagtgagcttcgtccagacactcgttatgtgcttatggatggttccatcatacagtttcctaacatttacctggagggttctgttagagtagtaacaacttttgatgctgagtactgtagacatggtacatgcgaaaggtcagaagcaggtatttgcctatctaccagtggtagatgggttcttaataatgagcattacagagctctatcaggagttttctgtggtgttgatgcgatgaatctcatagctaacatctttactcctcttgtgcaacctgtgggtgctttagatgtgtctgcttcagtagtggctggtggtattattgccatattggtgacttgtgctgcctactactttatgaaattcagacgtgcttttggtgagtacaaccatgttgttgctgctaatgcacttttgtttttgatgtctttcactatactctgtctggcaccagcttacagctttctgccgggagtctactcagtcttttacttgtacttgacattctatttcaccaatgatgtttcattcttggctcaccttcaatggtttgccatgttttctcctattgtgcctttttggataacagcaatctatgtattctgtatttctctgaagcactgccattggttctttaacaactatcttaggaaaagagtcatgtttaatggagttacatttagtaccttcgaggaggctgctttgtgtacctttttgctcaacaaggaaatgtacctaaaattgcgtagcgagacactgttgccacttacacagtataacaggtatcttgctctatataacaagtacaagtatttcagtggagccttagatactaccagctatcgtgaagcagcttgctgccacttagcaaaggctctaaatgactttagcaactcaggtgctgatgttctctaccaaccaccacagacatcaatcacttctgctgttctgcagagtggttttaggaaaatggcattcccgtcaggcaaagttgaaggatgcatggtacaagtaacctgtggaactacaactcttaatggattgtggttggatgacacagtatactgtccaagacatgtcatttgcacagcagaagacatgcttaatcctaactatgaagatctgctcattcgcaaatccaaccatagctttcttgttcaggctggcaatgttcaacttcgtgttattggccattctatgcaaaattgtctgcttaggcttaaagttgatacttctaaccctaagacacccaagtataaatttgtccgtatccaacctggtcaaacattttcggttctagcatgctacaatggttcaccatctggtgtttatcagtgtgccatgagacctaatcataccattaaaggttctttccttaatggatcatgtggtagtgttggttttaacattgattatgattgcgtgtctttctgctatatgcatcatatggagcttccaacaggagtacacgctggtactgacttagaaggtaaattctatggtccatttgttgacagacaaactgcacaggctgcaggtacagacacaaccataaccttaaatgttttggcatggctgtatgctgctgttatcaatggtgataggtggtttcttaatagattcaccactactttgaatgactttaaccttgtggcaatgaagtacaactatgaacctttgacacaagatcatgttgacatattgggacctctttctgctcaaacaggaattgccgtcttagatatgtgtgctgctttgaaagagctgctgcagaatggtatgaatggtcgtactatccttggtagcactattttagaagatgagtttacaccatttgatgttgttagacaatgctctggtgttaccttccaaggtaagttcaagaaaattgttaagggcactcatcattggatgcttttaactttcttgacatcactattgattcttgttcaaagtacacagtggtcactgtttttctttgtttacgagaatgctttcttgccatttactcttggtattatggcaattgctgcatgtgctatgctgcttgttaagcataagcacgcattcttgtgcttgtttctgttaccttctcttgcaacagttgcttactttaatatggtctacatgcctgctagctgggtgatgcgtatcatgacatggcttgaattggctgacactagcttgtctggttataggcttaaggattgtgttatgtatgcttcagctttagttttgcttattctcatgacagctcgcactgtttatgatgatgctgctagacgtgtttggacactgatgaatgtcattacacttgtttacaaagtctactatggtaatgctttagatcaagctatttccatgtgggccttagttatttctgtaacctctaactattctggtgtcgttacgactatcatgtttttagctagagctatagtgtttgtgtgtgttgagtattacccattgttatttattactggcaacaccttacagtgtatcatgcttgtttattgtttcttaggctattgttgctgctgctactttggccttttctgtttactcaaccgttacttcaggcttactcttggtgtttatgactacttggtctctacacaagaatttaggtatatgaactcccaggggcttttgcctcctaagagtagtattgatgctttcaagcttaacattaagttgttgggtattggaggtaaaccatgtatcaaggttgctactgtacagtctaaaatgtctgacgtaaagtgcacatctgtggtactgctctcggttcttcaacaacttagagtagagtcatcttctaaattgtgggcacaatgtgtacaactccacaatgatattcttcttgcaaaagacacaactgaagctttcgagaagatggtttctcttttgtctgttttgctatccatgcagggtgctgtagacattaataggttgtgcgaggaaatgctcgataaccgtgctactcttcaggctattgcttcagaatttagttctttaccatcatatgccgcttatgccactgcccaggaggcctatgagcaggctgtagctaatggtgattctgaagtcgttctcaaaaagttaaagaaatctttgaacgtggctaaatctgagtttgaccgtgatgctgccatgcaacgcaagttggaaaagatggcagatcaggctatgacccaaatgtacaaacaggcaagatctgaggacaagagggcaaaagtaactagtgctatgcaaacaatgctcttcactatgcttaggaagcttgataatgatgcacttaacaacattatcaacaatgcgcgtgatggttgtgttccactcaacatcataccattgactacagcagccaaactcatggttgttgtccctgattatggtacctacaagaacacttgtgatggtaacacctttacatatgcatctgcactctgggaaatccagcaagttgttgatgcggatagcaagattgttcaacttagtgaaattaacatggacaattcaccaaatttggcttggcctcttattgttacagctctaagagccaactcagctgttaaactacagaataatgaactgagtccagtagcactacgacagatgtcctgtgcggctggtaccacacaaacagcttgtactgatgacaatgcacttgcctactataacaattcgaagggaggtaggtttgtgctggcattactatcagaccaccaagatctcaaatgggctagattccctaagagtgatggtacaggtacaatttacacagaactggaaccaccttgtaggtttgttacagacacaccaaaagggcctaaagtgaaatacttgtacttcatcaaaggcttaaacaacctaaatagaggtatggtgctgggcagtttagctgctacagtacgtcttcaggctggaaatgctacagaagtacctgccaattcaactgtgctttccttctgtgcttttgcagtagaccctgctaaagcatataaggattacctagcaagtggaggacaaccaatcaccaactgtgtgaagatgttgtgtacacacactggtacaggacaggcaattactgtaacaccagaagctaacatggaccaagagtcctttggtggtgcttcatgttgtctgtattgtagatgccacattgaccatccaaatcctaaaggattctgtgacttgaaaggtaagtacgtccaaatacctaccacttgtgctaatgacccagtgggttttacacttagaaacacagtctgtaccgtctgcggaatgtggaaaggttatggctgtagttgtgaccaactccgcgaacccttgatgcagtctgcggatgcatcaacgtttttaaacgggtttgcggtgtaagtgcagcccgtcttacaccgtgcggcacaggcactagtactgatgtcgtctacagggcttttgatatttacaacgaaaaagttgctggttttgcaaagttcctaaaaactaattgctgtcgcttccaggagaaggatgaggaaggcaatttattagactcttactttgtagttaagaggcatactatgtctaactaccaacatgaagagactatttataacttggttaaagattgtccagcggttgctgtccatgactttttcaagtttagagtagatggtgacatggtaccacatatatcacgtcagcgtctaactaaatacacaatggctgatttagtctatgctctacgtcattttgatgagggtaattgtgatacattaaaagaaatactcgtcacatacaattgctgtgatgatgattatttcaataagaaggattggtatgacttcgtagagaatcctgacatcttacgcgtatatgctaacttaggtgagcgtgtacgccaatcattattaaagactgtacaattctgcgatgctatgcgtgatgcaggcattgtaggcgtactgacattagataatcaggatcttaatgggaactggtacgatttcggtgatttcgtacaagtagcaccaggctgcggagttcctattgtggattcatattactcattgctgatgcccatcctcactttgactagggcattggctgctgagtcccatatggatgctgatctcgcaaaaccacttattaagtgggatttgctgaaatatgattttacggaagagagactttgtctcttcgaccgttattttaaatattgggaccagacataccatcccaattgtattaactgtttggatgataggtgtatccttcattgtgcaaactttaatgtgttattttctactgtgtttccacctacaagttttggaccactagtaagaaaaatatttgtagatggtgttccttttgttgtttcaactggataccattttcgtgagttaggagtcgtacataatcaggatgtaaacttacatagctcgcgtctcagtttcaaggaacttttagtgtatgctgctgatccagctatgcatgcagcttctggcaatttattgctagataaacgcactacatgcttttcagtagctgcactaacaaacaatgttgcttttcaaactgtcaaacccggtaattttaataaagacttttatgactttgctgtgtctaaaggtttctttaaggaaggaagttctgttgaactaaaacacttcttctttgctcaggatggcaacgctgctatcagtgattatgactattatcgttataatctgccaacaatgtgtgatatcagacaactcctattcgtagttgaagttgttgataaatactttgattgttacgatggtggctgtattaatgccaaccaagtaatcgttaacaatctggataaatcagctggtttcccatttaataaatggggtaaggctagactttattatgactcaatgagttatgaggatcaagatgcacttttcgcgtatactaagcgtaatgtcatccctactataactcaaatgaatcttaagtatgccattagtgcaaagaatagagctcgcaccgtagctggtgtctctatctgtagtactatgacaaatagacagtttcatcagaaattattgaagtcaatagccgccactagaggagctactgtggtaattggaacaagcaagttttacggtggctggcataatatgttaaaaactgtttacagtgatgtagaaactccacaccttatgggttgggattatccaaaatgtgacagagccatgcctaacatgcttaggataatggcctctcttgttcttgctcgcaaacataacacttgctgtaacttatcacaccgtttctacaggttagctaacgagtgtgcgcaagtattaagtgagatggtcatgtgtggcggctcactatatgttaaaccaggtggaacatcatccggtgatgctacaactgcttatgctaatagtgtctttaacatttgtcaagctgttacagccaatgtaaatgcacttctttcaactgatggtaataagatagctgacaagtatgtccgcaatctacaacacaggctctatgagtgtctctatagaaatagggatgttgatcatgaattcgtggatgagttttacgcttacctgcgtaaacatttctccatgatgattctttctgatgatgccgttgtgtgctataacagtaactatgcggctcaaggtttagtagctagcattaagaactttaaggcagttctttattatcaaaataatgtgttcatgtctgaggcaaaatgttggactgagactgaccttactaaaggacctcacgaattttgctcacagcatacaatgctagttaaacaaggagatgattacgtgtacctgccttacccagatccatcaagaatattaggcgcaggctgttttgtcgatgatattgtcaaaacagatggtacacttatgattgaaaggttcgtgtcactggctattgatgcttacccacttacaaaacatcctaatcaggagtatgctgatgtctttcacttgtatttacaatacattagaaagttacatgatgagcttactggccacatgttggacatgtattccgtaatgctaactaatgataacacctcacggtactgggaacctgagttttatgaggctatgtacacaccacatacagtcttgcaggctgtaggtgcttgtgtattgtgcaattcacagacttcacttcgttgcggtgcctgtattaggagaccattcctatgttgcaagtgctgctatgaccatgtcatttcaacatcacacaaattagtgttgtctgttaatccctatgtttgcaatgccccaggttgtgatgtcactgatgtgacacaactgtatctaggaggtatgagctattattgcaagtcacataagcctcccattagttttccattatgtgctaatggtcaggtttttggtttatacaaaaacacatgtgtaggcagtgacaatgtcactgacttcaatgcgatagcaacatgtgattggactaatgctggcgattacatacttgccaacacttgtactgagagactcaagcttttcgcagcagaaacgctcaaagccactgaggaaacatttaagctgtcatatggtattgccactgtacgcgaagtactctctgacagagaattgcatctttcatgggaggttggaaaacctagaccaccattgaacagaaactatgtctttactggttaccgtgtaactaaaaatagtaaagtacagattggagagtacacctttgaaaaaggtgactatggtgatgctgttgtgtacagaggtactacgacatacaagttgaatgttggtgattactttgtgttgacatctcacactgtaatgccacttagtgcacctactctagtgccacaagagcactatgtgagaattactggcttgtacccaacactcaacatctcagatgagttttctagcaatgttgcaaattatcaaaaggtcggcatgcaaaagtactctacactccaaggaccacctggtactggtaagagtcattttgccatcggacttgctctctattacccatctgctcgcatagtgtatacggcatgctctcatgcagctgttgatgccctatgtgaaaaggcatcaaaatatttgcccatagataaatgtagtagaatcatacctgcgcgtgcgcgcgtagagtgttttgataaattcaaagtgaattcaacactagaacagtatgttttctgcactgtaaatgcattgccagaaacaactgctgacattgtagtctttgatgaaatctctatggctactaattatgacttgagtgttgtcaatgctagacttcgtgcaaaacactacgtctatattggcgatcctgctcaattaccagccccccgcacattgctgactaaaggcacactagaaccagaatattttaattcagtgtgcagacttatgaaaacaataggtccagacatgttccttggaacttgtcgccgttgtcctgctgaaattgttgacactgtgagtgctttagtttatgacaataagctaaaagcacacaaggagaagtcagctcaatgcttcaaaatgttctacaaaggtgttattacacatgatgtttcatctgcaatcaacagacctcaaataggcgttgtaagagaatttcttacacgcaatcctgcttggagaaaagctgtttttatctcaccttataattcacagaacgctgtagcttcaaaaatcttaggattgcctacgcagactgttgattcatcacagggttctgaatatgactatgtcatattcacacaaactactgaaacagcacactcttgtaatgtcaaccgcttcaatgtggctatcacaagggcaaaaattggcattttgtgcataatgtctgatagagatctttatgacaaactgcaatttacaagtctagaaataccacgtcgcaatgtggctacattacaagcagaaaatgtaactggactttttaaggactgtagtaagatcattactggtcttcatcctacacaggcacctacacacctcagcgttgatataaagttcaagactgaaggattatgtgttgacataccaggcataccaaaggacatgacctaccgtagactcatctctatgatgggtttcaaaatgaattaccaagtcaatggttatcctaatatgtttatcacccgcgaagaagctattcgtcacgttcgtgcgtggattggctttgatgtagagggctgtcatgcaactagagatgctgtgggtactaacctacctctccagctaggattttctacaggtgttaacttagtagctgtaccgactggttatgttgacactgaaaataacacagaattcaccagagttaatgcaaaacctccaccaggtgaccagtttaaacatcttataccactcatgtataaaggcttgccctggaatgtagtgcgtattaagatagtacaaatgctcagtgatacactgaaaggattgtcagacagagtcgtgttcgtcctttgggcgcatggctttgagcttacatcaatgaagtactttgtcaagattggacctgaaagaacgtgttgtctgtgtgacaaacgtgcaacttgcttttctacttcatcagatacttatgcctgctggaatcattctgtgggttttgactatgtctataacccatttatgattgatgttcagcagtggggctttacgggtaaccttcagagtaaccatgaccaacattgccaggtacatggaaatgcacatgtggctagttgtgatgctatcatgactagatgtttagcagtccatgagtgctttgttaagcgcgttgattggtctgttgaataccctattataggagatgaactgagggttaattctgcttgcagaaaagtacaacacatggttgtgaagtctgcattgcttgctgataagtttccagttcttcatgacattggaaatccaaaggctatcaagtgtgtgcctcaggctgaagtagaatggaagttctacgatgctcagccatgtagtgacaaagcttacaaaatagaggaactcttctattcttatgctacacatcacgataaattcactgatggtgtttgtttgttttggaattgtaacgttgatcgttacccagccaatgcaattgtgtgtaggtttgacacaagagtcttgtcaaacttgaacttaccaggctgtgatggtggtagtttgtatgtgaataagcatgcattccacactccagctttcgataaaagtgcatttactaatttaaagcaattgcctttcttttactattctgatagtccttgtgagtctcatggcaaacaagtagtgtcggatattgattatgttccactcaaatctgctacgtgtattacacgatgcaatttaggtggtgctgtttgcagacaccatgcaaatgagtaccgacagtacttggatgcatataatatgatgatttctgctggatttagcctatggatttacaaacaatttgatacttataacctgtggaatacatttaccaggttacagagtttagaaaatgtggcttataatgttgttaataaaggacactttgatggacacgccggcgaagcacctgtttccatcattaataatgctgtttacacaaaggtagatggtattgatgtggagatctttgaaaataagacaacacttcctgttaatgttgcatttgagctttgggctaagcgtaacattaaaccagtgccagagattaagatactcaataatttgggtgttgatatcgctgctaatactgtaatctgggactacaaaagagaagccccagcacatgtgtctacaataggtgtctgcacaatgactgacattgccaagaaacctactgagagtgcttgttcttcacttactgtcttgtttgatggtagagtggaaggacaggtagacctttttagaaacgcccgtaatggtgttttaataacagaaggttcagtcaaaggtctaacaccttcaaagggaccagcacaagctagcgtcaatggagtcacattaattggagaatcagtaaaaacacagtttaactactttaagaaagtagacggcattattcaacagttgcctgaaacctactttactcagagcagagacttagaggattttaagcccagatcacaaatggaaactgactttctcgagctcgctatggatgaattcatacagcgatataagctcgagggctatgccttcgaacacatcgtttatggagatttcagtcatggacaacttggcggtcttcatttaatgataggcttagccaagcgctcacaagattcaccacttaaattagaggattttatccctatggacagcacagtgaaaaattacttcataacagatgcgcaaacaggttcatcaaaatgtgtgtgttctgtgattgatcttttacttaatgacttcgtcgagataataaagtcacaagatttgtcagtgatttcaaaagtggtcaaggttacaattgactatgctgaaatttcattcatgctttggtgtaaggatggacatgttgaaaccttctacccaaaactacaagcaagtcaagcgtggcaaccaggtgttgcgatgcctaacttgtacaagatgcaaagaatgcttcttgaaaagtgtgaccttcagaattatggtgaaaatgctgttataccaaaaggaataatgatgaatgtcgcaaagtatactcaactgtgtcaatacttaaatacacttactttagctgtaccctacaacatgagagttattcactttggtgctggctctgataaaggagttgcaccaggtacagctgtgctcagacaatggttgccaactggcacactacttgtcgattcagatcttaatgaattcgtctccgacgcagattctactttaattggagactgtgcaacagtacatacggctaataaatgggaccttatcattagcgatatgtatgaccctaggaccaaacatgtgacaaaagagaatgactctaaagaagggtttttcacttatctgtgtggatttataaagcaaaaactagccctgggtggttctatagctgtaaagataacagagcattcttggaatgctgacctttacaagcttatgggccatttctcatggtggacagcttttgttacaaatgtaaatgcatcatcatcggaagcatttttaattggggctaactatcttggcaagccgaaggaacaaattgatggctataccatgcatgctaactacattttctggaggaagacaaatcctatccagttgtcttcctattcactctttgacatgagcaaatttcctcttaaattaagaggaactgctgtaatgtctcttaaggagaatcaaatcaatgatatgatttattctcttctggaaaaaggtaggcttatcattagagaaaacaacagagttgtggtttcaagtgatattcttgttaataactaaacgaacatgtttattttcttattatttcttactctcactagtggtagtgaccttgaccggtgcaccacttttgatgatgttcaagctcctaattacactcaacatacttcatctatgaggggggtttactatcctgatgaaatttttagatcagacactctttatttaactcaggatttatttcttccattttattctaatgttacagggtttcatactattaatcatacgtttgacaaccctgtcataccttttaaggatggtatttattttgctgccacagagaaatcaaatgttgtccgtggttgggtttttggttctaccatgaacaacaagtcacagtcggtgattattattaacaattctactaatgttgttatacgagcatgtaactttgaattgtgtgacaaccctttctttgctgtttctaaacccatgggtacacagacacatactatgatattcgataatgcatttaattgcactttcgagtacatatctgatgccttttcgcttgatgtttcagaaaagtcaggtaattttaaacacttacgagagtttgtgtttaaaaataaagatgggtttctctatgtttataagggctatcaacctatagatgtagttcgtgatctaccttctggttttaacactttgaaacccatttttaagttgcctcttggtattaacattacaaattttagagccattcttacagcctttttacctgctcaagacacttggggcacgtcagctgcagcctattttgttggctatttaaagccaactacatttatgctcaagtatgatgaaaatggtacaatcacagatgctgttgattgttctcaaaatccacttgctgaactcaaatgctctgttaagagctttgagattgacaaaggaatttaccagacctctaatttcagggttgttccctcaagagatgttgtgagattccctaatattacaaacttgtgtccttttggagaggtttttaatgctactaaattcccttctgtctatgcatgggagaggaaaagaatttctaattgtgttgctgattactctgtgctctacaactcaacatttttttcaacctttaagtgctatggcgtttctgccactaagttgaatgatctttgcttctccaatgtctatgcagattcttttgtagtcaagggagatgatgtaagacaaatagcgccaggacaaactggtgttattgctgattataattataaattgccagatgatttcatgggttgtgtccttgcttggaatactaggaacattgatgctacttcaactggtaattataattataaatataggtatcttagacatggcaagcttaggccctttgagagagacatatctaatgtgcctttctcccctgatggcaaaccttgcaccccacctgctcttaattgttattggccattaaatgattatggtttttacaccactactggcattggctaccaaccttacagagttgtagtactttcttatgaacttttaaatgcaccggccacggtttgtggaccaaaattatccactgaccttattaagaaccagtgtgtcaattttaattttaatggactcactggtactggtgtgttaactccttcttcaaagagatttcaaccatttcaacaatttggccgtgatgtttctgatttcactgattccgttcgagatcctaaaacatctgaaatattagacatttcaccttgctcttttgggggtgtaagtgtaattacacctggaacaaatgcttcatctgaagttgctgttctatatcaagatgttaactgcactgatgtttctacagcaattcatgcagatcaactcacaccagcttggcgcatatattctactggaaacaatgtattccagactcaagcaggctgtcttataggagctgagcatgtcgacacttcttatgagtgcgacattcctattggagctggcatttgtgctagttaccatacagtttctttattacgtagtactagccaaaaatctattgtggcttatactatgtctttaggtgctgatagttcaattgcttactctaataacaccattgctatacctactaacttttcaattagcattactacagaagtaatgcctgtttctatggctaaaacctccgtagattgtaatatgtacatctgcggagattctactgaatgtgctaatttgcttctccaatatggtagcttttgcacacaactaaatcgtgcactctcaggtattgctgctgaacaggatcgcaacacacgtgaagtgttcgctcaagtcaaacaaatgtacaaaaccccaactttgaaagattttggtggttttaatttttcacaaatattacctgaccctctaaagtcaactaagaggtcttttattgaggacttgctctttaataaggtgacactcgctgatgctggcttcatgaagcaatatggcgaatgcctaggtgatattaatgctagagatctcatttgtgcgcagaagttcaatggacttacagtgttgccacctctgctcactgatgatatgattgctgcctacactgctgctctagttagtggtactgccactgctggatggacatttggtgctggcgctgctcttcaaataccttttgctatgcaaatggcatataggttcaatggcattggagttacccaaaatgttctctatgagaaccaaaaacaaatcgccaaccaatttaacaaggcgattagtcaaattcaagaatcacttacaacaacatcaactgcattgggcaagctgcaagacgttgttaaccagaatgctcaagcattaaacacacttgttaaacaacttagctctaattttggtgcaatttcaagtgtgctaaatgatatcctttcgcgacttgataaagtcgaggcggaggtacaaattgacaggttaattacaggcagacttcaaagccttcaaacctatgtaacacaacaactaatcagggctgctgaaatcagggcttctgctaatcttgctgctactaaaatgtctgagtgtgttcttggacaatcaaaaagagttgacttttgcggaaagggctaccaccttatgtccttcccacaagcagccccgcatggtgttgtcttcctacatgtcacgtatgtgccatcccaggagaggaacttcaccacagcgccagcaatttgtcatgaaggcaaagcatacttccctcgtgaaggtgtttttgtgtttaatggcacttcttggtttattacacagaggaacttcttttctccacaaataattactacagacaatacatttgtctcaggaaattgtgatgtcgttattggcatcattaacaacacagtttatgatcctctgcaacctgagcttgactcattcaaagaagagctggacaagtacttcaaaaatcatacatcaccagatgttgatcttggcgacatttcaggcattaacgcttctgtcgtcaacattcaaaaagaaattgaccgcctcaatgaggtcgctaaaaatttaaatgaatcactcattgaccttcaagaattgggaaaatatgagcaatatattaaatggccttggtatgtttggctcggcttcattgctggactaattgccatcgtcatggttacaatcttgctttgttgcatgactagttgttgcagttgcctcaagggtgcatgctcttgtggttcttgctgcaagtttgatgaggatgactctgagccagttctcaagggtgtcaaattacattacacataaacgaacttatggatttgtttatgagattttttactcttggatcaattactgcacagccagtaaaaattgacaatgcttctcctgcaagtactgttcatgctacagcaacgataccgctacaagcctcactccctttcggatggcttgttattggcgttgcatttcttgctgtttttcagagcgctaccaaaataattgcgctcaataaaagatggcagctagccctttataagggcttccagttcatttgcaatttactgctgctatttgttaccatctattcacatcttttgcttgtcgctgcaggtatggaggcgcaatttttgtacctctatgccttgatatattttctacaatgcatcaacgcatgtagaattattatgagatgttggctttgttggaagtgcaaatccaagaacccattactttatgatgccaactactttgtttgctggcacacacataactatgactactgtataccatataacagtgtcacagatacaattgtcgttactgcaggtgacggcatttcaacaccaaaactcaaagaagactaccaaattggtggttattctgaggattggcactcaggtgttaaagactatgtcgttgtacatggctatttcaccgaagtttactaccagcttgagtctacacaaattactacagacactggtattgaaaatgctacattcttcatctttaacaagcttgttaaagacccaccgaatgtgcaaatacacacaatcgacggctcttcaggagttgcaaatccagcaatggatccaatttatgatgagccgacgacgactactagcgtgcctttgtaagcacaagaaagtgagtacgaacttatgtactcattcgtttcggaagaaacaggtacgttaatagttaatagcgtacttctttttcttgctttcatggtattcttgctagtcacactagccatccttactgcgcttcgattgtgtgcgtactgctgcaatattgttaacgtgagtttagtaaaaccaacggtttacgtctactcgcgtgttaaaaatctgaactcttctgaaggagttcctgatcttctggtctaaacgaactaactattattattattctgtttggaactttaacattgcttatcatggcagacaacggtactattaccgttgaggagcttaaacaactcctggaacaatggaacctagtaataggtttcctattcctagcctggattatgttactacaatttgcctattctaatcggaacaggtttttgtacataataaagcttgttttcctctggctcttgtggccagtaacacttgcttgttttgtgcttgctgctgtctacagaattaattgggtgactggcgggattgcgattgcaatggcttgtattgtaggcttgatgtggcttagctacttcgttgcttccttcaggctgtttgctcgtacccgctcaatgtggtcattcaacccagaaacaaacattcttctcaatgtgcctctccgggggacaattgtgaccagaccgctcatggaaagtgaacttgtcattggtgctgtgatcattcgtggtcacttgcgaatggccggacactccctagggcgctgtgacattaaggacctgccaaaagagatcactgtggctacatcacgaacgctttcttattacaaattaggagcgtcgcagcgtgtaggcactgattcaggttttgctgcatacaaccgctaccgtattggaaactataaattaaatacagaccacgccggtagcaacgacaatattgctttgctagtacagtaagtgacaacagatgtttcatcttgttgacttccaggttacaatagcagagatattgattatcattatgaggactttcaggattgctatttggaatcttgacgttataataagttcaatagtgagacaattatttaagcctctaactaagaagaattattcggagttagatgatgaagaacttatggagttagattatccataaaacgaacatgaaaattattctcttcctgacattgattgtatttacatcttgcgagctatatcactatcaggagtgtgttagaggtacgactgtactactaaaagaaccttgcccatcaggaacatacgagggcaattcaccatttcaccctcttgctgacaataaatttgcactaacttgcactagcacacactttgcttttgcttgtgctgacggtactcgacatacctatcagctgcgtgcaagatcagtttcaccaaaacttttcatcagacaagaggaggttcaacaagagctctactcgccactttttctcattgttgctgctctagtatttttaatactttgcttcaccattaagagaaagacagaatgaatgagctcactttaattgacttctatttgtgctttttagcctttctgctattccttgttttaataatgcttattatattttggttttcactcgaaatccaggatctagaagaaccttgtaccaaagtctaaacgaacatgaaacttctcattgttttgacttgtatttctctatgcagttgcatacgcactgtagtacagcgctgtgcatctaataaacctcatgtgcttgaagatccttgtcctactggttaccaacctgaatggaatataaggtacaacactaggggtaatacttatagcactgcttggctttgtgctctaggaaaggttttaccttttcatagatggcacactatggttcaaacatgcacacctaatgttactatcaactgtcaagatccagctggtggtgcgcttatagctaggtgttggtaccttcatgaaggtcaccaaactgctgcatttagagacgtatttgttgttttaaataaacgaacaaattaaaatgtctgataatggaccccaatcaaaccaacgtagtgccccccgcattacatttggtggacccacagattcaactgacaataaccagaatggaggacgcaatggggcaaggccaaaacagcgccgaccccaaggtttacccaataatactgcgtcttggttcacagctctcactcagcatggcaaggaggaacttagattccctcgaggccagggcgttccaatcaacaccaatagtggtccagatgaccaaattggctactaccgaagagctacccgacgagttcgtggtggtgacggcaaaatgaaagagctcagccccagatggtacttctattacctaggaactggcccagaagcttcacttccctacggcgctaacaaagaaggcatcgtatgggttgcaactgagggagccttgaatacacccaaagaccacattggcacccgcaatcctaataacaatgctgccaccgtgctacaacttcctcaaggaacaacattgccaaaaggcttctacgcagagggaagcagaggcggcagtcaagcctcttctcgctcctcatcacgtagtcgcggtaattcaagaaattcaactcctggcagcagtaggggaaattctcctgctcgaatggctagcggaggtggtgaaactgccctcgcgctattgctgctagacagattgaaccagcttgagagcaaagtttctggtaaaggccaacaacaacaaggccaaactgtcactaagaaatctgctgctgaggcatctaaaaagcctcgccaaaaacgtactgccacaaaacagtacaacgtcactcaagcatttgggagacgtggtccagaacaaacccaaggaaatttcggggaccaagacctaatcagacaaggaactgattacaaacattggccgcaaattgcacaatttgctccaagtgcctctgcattctttggaatgtcacgcattggcatggaagtcacaccttcgggaacatggctgacttatcatggagccattaaattggatgacaaagatccacaattcaaagacaacgtcatactgctgaacaagcacattgacgcatacaaaacattcccaccaacagagcctaaaaaggacaaaaagaaaaagactgatgaagctcagcctttgccgcagagacaaaagaagcagcccactgtgactcttcttcctgcggctgacatggatgatttctccagacaacttcaaaattccatgagtggagcttctgctgattcaactcaggcataaacactcatgatgaccacacaaggcagatgggctatgtaaacgttttcgcaattccgtttacgatacatagtctactcttgtgcagaatgaattctcgtaactaaacagcacaagtaggtttagttaactttaatctcacatagcaatctttaatcaatgtgtaacattagggaggacttgaaagagccaccacattttcatcgaggccacgcggagtacgatcgagggtacagtgaataatgctagggagagctgcctatatggaagagccctaatgtgtaaaattaattttagtagtgctatccccatgtgattttaatagcttcttaggagaatgacaaaaaaaaaaaaaaaaa

SEQ ID NO: 29770 - DNA, 29740 bp, SARS Coronavirus
taggtttttacctacccaggaaaagccaaccaacctcgatctcttgtagatctgttctctaaacgaactttaaaatctgtgtagctgtcgctcggctgcatgcctagtgcacctacgcagtataaacaataataaattttactgtcgttgacaagaaacgagtaactcgtccctcttctgcagactgcttacggtttcgtccgtgttgcagtcgatcatcagcatacctaggtttcgtccgggtgtgaccgaaaggtaagatggagagccttgttcttggtgtcaacgagaaaacacacgtccaactcagtttgcctgtccttcaggttagagacgtgctagtgcgtggcttcggggactctgtggaagaggccctatcggaggcacgtgaacacctcaaaaatggcacttgtggtctagtagagctggaaaaaggcgtactgccccagcttgaacagccctatgtgttcattaaacgttctgatgccttaagcaccaatcacggccacaaggtcgttgagctggttgcagaaatggacggcattcagtacggtcgtagcggtataacactgggagtactcgtgccacatgtgggcgaaaccccaattgcataccgcaatgttcttcttcgtaagaacggtaataagggagccggtggtcatagctatggcatcgatctaaagtcttatgacttaggtgacgagcttggcactgatcccattgaagattatgaacaaaactggaacactaagcatggcagtggtgcactccgtgaactcactcgtgagctcaatggaggtgcagtcactcgctatgtcgacaacaatttctgtggcccagatgggtaccctcttgattgcatcaaagattttctcgcacgcgcgggcaagtcaatgtgcactctttccgaacaacttgattacatcgagtcgaagagaggtgtctactgctgccgtgaccatgagcatgaaattgcctggttcactgagcgctctgataagagctacgagcaccagacacccttcgaaattaagagtgccaagaaatttgacactttcaaaggggaatgcccaaagtttgtgtttcctcttaactcaaaagtcaaagtcattcaaccacgtgttgaaaagaaaaagactgagggtttcatggggcgtatacgctctgtgtaccctgttgcatctccacaggagtgtaacaatatgcacttgtctaccttgatgaaatgtaatcattgcgatgaagtttcatggcagacgtgcgactttctgaaagccacttgtgaacattgtggcactgaaaatttagttattgaaggacctactacatgtgggtacctacctactaatgctgtagtgaaaatgccatgtcctgcctgtcaagacccagagattggacctgagcatagtgttgcagattatcacaaccactcaaacattgaaactcgactccgcaagggaggtaggactagatgttttggaggctgtgtgtttgcctatgttggctgctataataagcgtgcctactgggttcctcgtgctagtgctgatattggctcaggccatactggcattactggtgacaatgtggagaccttgaatgaggatctccttgagatactgagtcgtgaacgtgttaacattaacattgttggcgattttcatttgaatgaagaggttgccatcattttggcatctttctctgcttctacaagtgcctttattgacactataaagagtcttgattacaagtctttcaaaaccattgttgagtcctgcggtaactataaagttaccaagggaaagcccgtaaaaggtgcttggaacattggacaacagagatcagttttaacaccactgtgtggttttccctcacaggctgctggtgttatcagatcaatttttgcgcgcacacttgatgcagcaaaccactcaattcctgatttgcaaagagcagctgtcaccatacttgatggtatttctgaacagtcattacgtcttgtcgacgccatggtttatacttcagacctgctcaccaacagtgtcattattatggcatatgtaactggtggtcttgtacaacagacttctcagtggttgtctaatcttttgggcactactgttgaaaaactcaggcctatctttgaatggattgaggcgaaacttagtgcaggagttgaatttctcaaggatgcttgggagattctcaaatttctcattacaggtgtttttgacatcgtcaagggtcaaatacaggttgcttcagataacatcaaggattgtgtaaaatgcttcattgatgttgttaacaaggcactcgaaatgtgcattgatcaagtcactatcgctggcgcaaagttgcgatcactcaacttaggtgaagtcttcatcgctcaaagcaagggactttaccgtcagtgtatacgtggcaaggagcagctgcaactactcatgcctcttaaggcaccaaaagaagtaacctttcttgaaggtgattcacatgacacagtacttacctctgaggaggttgttctcaagaacggtgaactcgaagcactcgagacgcccgttgatagcttcacaaatggagctatcgttggcacaccagtctgtgtaaatggcctcatgctcttagagattaaggacaaagaacaatactgcgcattgtctcctggtttactggctacaaacaatgtctttcgcttaaaagggggtgcaccaattaaaggtgtaacctttggagaagatactgtttgggaagttcaaggttacaagaatgtgagaatcacatttgagcttgatgaacgtgttgacaaagtgcttaatgaaaagtgctctgtctacactgttgaatccggtaccgaagttactgagtttgcatgtgttgtagcagaggctgttgtgaagactttacaaccagtttctgatctccttaccaacatgggtattgatcttgatgagtggagtgtagctacattctacttatttgatgatgctggtgaagaaaacttttcatcacgtatgtattgttccttttaccctccagatgaggaagaagaggacgatgcagagtgtgaggaagaagaaattgatgaaacctgtgaacatgagtacggtacagaggatgattatcaaggtctccctctggaatttggtgcctcagctgaaacagttcgagttgaggaagaagaagaggaagactggctggatgatactactgagcaatcagagattgagccagaaccagaacctacacctgaagaaccagttcatcagtttactggttatttaaaacttactgacaatgttgccattaaatgtgttgacatcgttaaggaggcacaaagtgctaatcctatggtgattgtaaatgctgctaacatacacctgaaacatggtggtggtgtagcaggtgcactcaacaaggcaaccaatggtgccatgcaaaaggagagtgatgattacattaagctaaatggccctcttacagtaggagggtcttgtttgctttctggacataatcttgctaagaagtgtctgcatgttgttggacctaacctaaatgcaggtgaggacatccagcttcttaaggcagcatatgaaaatttcaattcacaggacatcttacttgcaccattgttgtcagcaggcatatttggtgctaaaccacttcagtctttacaagtgtgcgtgcagacggttcgtacacaggtttatattgcagtcaatgacaaagctctttatgagcaggttgtcatggattatcttgataacctgaagcctagagtggaagcacctaaacaagaggagccaccaaacacagaagattccaaaactgaggagaaatctgtcgtacagaagcctgtcgatgtgaagccaaaaattaaggcctgcattgatgaggttaccacaacactggaagaaactaagtttcttaccaataagttactcttgtttgctgatatcaatggtaagctttaccatgattctcagaacatgcttagaggtgaagatatgtctttccttgagaaggatgcaccttacatggtaggtgatgttatcactagtggtgatatcacttgtgttgtaataccctccaaaaaggctggtggcactactgagatgctctcaagagctttgaagaaagtgccagttgatgagtatataaccacgtaccctggacaaggatgtgctggttatacacttgaggaagctaagactgctcttaagaaatgcaaatctgcattttatgtactaccttcagaagcacctaatgctaaggaagagattctaggaactgtatcctggaatttgagagaaatgcttgctcatgctgaagagacaagaaaattaatgcctatatgcatggatgttagagccataatggcaaccatccaacgtaagtataaaggaattaaaattcaagagggcatcgttgactatggtgtccgattcttcttttatactagtaaagagcctgtagcttctattattacgaagctgaactctctaaatgagccgcttgtcacaatgccaattggttatgtgacacatggttttaatcttgaagaggctgcgcgctgtatgcgttctcttaaagctcctgccgtagtgtcagtatcatcaccagatgctgttactacatataatggatacctcacttcgtcatcaaagacatctgaggagcactttgtagaaacagtttctttggctggctcttacagagattggtcctattcaggacagcgtacagagttaggtgttgaatttcttaagcgtggtgacaaaattgtgtaccacactctggagagccccgtcgagtttcatcttgacggtgaggttctttcacttgacaaactaaagagtctcttatccctgcgggaggttaagactataaaagtgttcacaactgtggacaacactaatctccacacacagcttgtggatatgtctatgacatatggacagcagtttggtccaacatacttggatggtgctgatgttacaaaaattaaacctcatgtaaatcatgagggtaagactttctttgtactacctagtgatgacacactacgtagtgaagctttcgagtactaccatactcttgatgagagttttcttggtaggtacatgtctgctttaaaccacacaaagaaatggaaatttcctcaagttggtggtttaacttcaattaaatgggctgataacaattgttatttgtctagtgttttattagcacttcaacagcttgaagtcaaattcaatgcaccagcacttcaagaggcttattatagagcccgtgctggtgatgctgctaacttttgtgcactcatactcgcttacagtaataaaactgttggcgagcttggtgatgtcagagaaactatgacccatcttctacagcatgctaatttggaatctgccaagcgagttcttaatgtggtgtgtaaacattgtggtcagaaaactactaccttaacgggtgtagaagctgtgatgtatatgggtactctatcttatgataatcttaagacaggtgtttcccttccatgtgtgtgtggtcgtgatgctacacaatatctagtaccaccagagtcttcttttgttatgatgtctgcaccacctgctgagtataaattacagcaaggtacattcttatgtgcgaatgagtacactggtaactatcagtgtggtcattacactcatataactgctaaggagaccctctatcgtattgacggagctcaccttacaaagatgtcagagtacaaaggaccagtgactgatgttttctacaaggaaacatcttacactacaaccatcaagcctgtgtcgtataaactcgatggagttacttacacagagattgaaccaaaattggatgggtattataaaaaggataatgcttactatacagagcagcctatagaccttgtaccaactcaaccattaccaaatgcgagttttgataatttcaaactcacatgttctaacacaaaatttgctgatgatttaaatcaaatgacaggcttcacaaagccagcttcacgagagctatctgtcacattcttcccagacttgaatggcgatgtagtggctattgactatagacactattcagcgagtttcaagaaaggtgctaaattactgcataagccaattgtttggcacattaaccaggctacaaccaagacaacgttcaaaccaaacacttggtgtttacgttgtctttggagtacaaagccagtagatacttcaaattcatttgaagttctggcagtagaagacacacaaggaatggacaatcttgcttgtgaaagtcaacaacccacctctgaagaagtagtggaaaatcctaccatacagaaggaagtcatagagtgtgacgtgaaaactaccgaagttgtaggcaatgtcatacttaaaccatcagatgaaggtgttaaagtaacacaagagttaggtcatgaggatcttatggctgcttatgtggaaaacacaagcattaccattaagaaacctaatgagctttcactagccttaggtttaaaaacaattgccactcatggtattgctgcaattaatagtgttccttggagtaaaattttggcttatgtcaaaccattcttaggacaagcagcaattacaacatcaaattgcgctaagagattagcacaacgtgtgtttaacaattatatgccttatgtgtttacattattgttccaattgtgtacttttactaaaagtaccaattctagaattagagcttcactacctacaactattgctaaaaatagtgttaagagtgttgctaaattatgtttggatgccggcattaattatgtgaagtcacccaaattttctaaattgttcacaatcgctatgtggctattgttgttaagtatttgcttaggttctctaatctgtgtaactgctgcttttggtgtactcttatctaattttggtgctccttcttattgtaatggcgttagagaattgtatcttaattcgtctaacgttactactatggatttctgtgaaggttcttttccttgcagcatttgtttaagtggattagactcccttgattcttatccagctcttgaaaccattcaggtgacgatttcatcgtacaagctagacttgacaattttaggtctggccgctgagtgggttttggcatatatgttgttcacaaaattcttttatttattaggtctttcagctataatgcaggtgttctttggctattttgctagtcatttcatcagcaattcttggctcatgtggtttatcattagtattgtacaaatggcacccgtttctgcaatggttaggatgtacatcttctttgcttctttctactacatatggaagagctatgttcatatcatggatggttgcacctcttcgacttgcatgatgtgctataagcgcaatcgtgccacacgcgttgagtgtacaactattgttaatggcatgaagagatctttctatgtctatgcaaatggaggccgtggcttctgcaagactcacaattggaattgtctcaattgtgacacattttgcactggtagtacattcattagtgatgaagttgctcgtgatttgtcactccagtttaaaagaccaatcaaccctactgaccagtcatcgtatattgttgatagtgttgctgtgaaaaatggcgcgcttcacctctactttgacaaggctggtcaaaagacctatgagagacatccgctctcccattttgtcaatttagacaatttgagagctaacaacactaaaggttcactgcctattaatgtcatagtttttgatggcaagtccaaatgcgacgagtctgcttctaagtctgcttctgtgtactacagtcagctgatgtgccaacctattctgttgcttgaccaagctcttgtatcagacgttggagatagtactgaagtttccgttaagatgtttgatgcttatgtcgacaccttttcagcaacttttagtgttcctatggaaaaacttaaggcacttgttgctacagctcacagcgagttagcaaagggtgtagctttagatggtgtcctttctacattcgtgtcagctgcccgacaaggtgttgttgataccgatgttgacacaaaggatgttattgaatgtctcaaactttcacatcactctgacttagaagtgacaggtgacagttgtaacaatttcatgctcacctataataaggttgaaaacatgacgcccagagatcttggcgcatgtattgactgtaatgcaaggcatatcaatgcccaagtagcaaaaagtcacaatgtttcactcatctggaatgtaaaagactacatgtctttatctgaacagctgcgtaaacaaattcgtagtgctgccaagaagaacaacataccttttagactaacttgtgctacaactagacaggttgtcaatgtcataactactaaaatctcactcaagggtggtaagattgttagtacttgttttaaacttatgcttaaggccacattattgtgcgttcttgctgcattggtttgttatatcgttatgccagtacatacattgtcaatccatgatggttacacaaatgaaatcattggttacaaagccattcaggatggtgtcactcgtgacatcatttctactgatgattgttttgcaaataaacatgctggttttgacgcatggtttagccagcgtggtggttcatacaaaaatgacaaaagctgccctgtagtagctgctatcattacaagagagattggtttcatagtgcctggcttaccgggtactgtgctgagagcaatcaatggtgacttcttgcattttctacctcgtgtttttagtgctgttggcaacatttgctacacaccttccaaactcattgagtatagtgattttgctacctctgcttgcgttcttgctgctgagtgtacaatttttaaggatgctatgggcaaacctgtgccatattgttatgacactaatttgctagagggttctatttcttatagtgagcttcgtccagacactcgttatgtgcttatggatggttccatcatacagtttcctaacacttacctggagggttctgttagagtagtaacaacttttgatgctgagtactgtagacatggtacatgcgaaaggtcagaagtaggtatttgcctatctaccagtggtagatgggttcttaataatgagcattacagagctctatcaggagttttctgtggtgttgatgcgatgaatctcatagctaacatctttactcctcttgtgcaacctgtgggtgctttagatgtgtctgcttcagtagtggctggtggtattattgccatattggtgacttgtgctgcctactactttatgaaattcagacgtgcttttggtgagtacaaccatgttgttgctgctaatgcacttttgtttttgatgtctttcactatactctgtctggtaccagcttacagctttctgccgggagtctactcagtcttttacttgtacttgacattctatttcaccaatgatgtttcattcttggctcaccttcaatggtttgccatgttttctcctattgtgcctttttggataacagcaatctatgtattctgtatttctctgaagcactgccattggttctttaacaactatcttaggaaaagagtcatgtttaatggagttacatttagtaccttcgaggaggctgctttgtgtacctttttgctcaacaaggaaatgtacctaaaattgcgtagcgagacactgttgccacttacacagtataacaggtatcttgctctatataacaagtacaagtatttcagtggagtcttagatactaccagctatcgtgaagcagcttgctgccacttagcaaaggctctaaatgactttagcaactcaggtgctgatgttctctaccaaccaccacagacatcaatcacttctgctgttctgcagagtggttttaggaaaatggcattcccgtcaggcaaagttgaagggtgcatggtacaagtaacctgtggaactacaactcttaatggattgtggttggatgacacagtatactgtccaagacatgtcatttgcacagcagaagacatgcttaatcctaactatgaagatctgctcattcgcaaatccaaccatagctttcttgttcaggctggcaatgttcaacttcgtgttattggccattctatgcaaaattgtctgcttaggcttaaagttgatacttctaaccctaagacacccaagtataaatttgtccgtatccaacctggtcaaacattttcagttctagcatgctacaatggttcaccatctggtgtttatcagtgtgccatgagacctaatcataccattaaaggttctttccttaatggatcatgtggtagtgttggttttaacattgattatgattgcgtgtctttctgctatatgcatcatatggagcttccaacaggagtacacgctggtactgacttagaaggtaaattctatggtccatttgttgacagacaaactgcacaggctgcaggtacagacacaaccataacattaaatgttttggcatggctgtatgctgctgttatcaatggtgataggtggtttcttaatagattcaccactactttgaatgactttaaccttgtggcaatgaagtacaactatgaacctttgacacaagatcatgttgacatattgggacctctttctgctcaaacaggaattgccgtcttagatatgtgtgctgctttgaaagagctgctgcagaatggtatgaatggtcgtactatccttggtagcactattttagaagatgagtttacaccatttgatgttgttagacaatgctctggtgttaccttccaaggtaagttcaagaaaattgttaagggcactcatcattggatgcttttaactttcttgacatcactattgattcttgttcaaagtacacagtggtcactgtttttctttgtttacgagaatgctttcttgccatttactcttggtattatggcaattgctgcatgtgctatgctgcttgttaagcataagcacgcattcttgtgcttgtttctgttaccttctcttgcaacagttgcttactttaatatggtctacatgcctgctagctgggtgatgcgtatcatgacatggcttgaattggctgacactagcttgtctggttataggcttaaggattgtgttatgtatgcttcagctttagttttgcttattctcatgacagctcgcactgtttatgatgatgctgctagacgtgtttggacactgatgaatgtcattacacttgtttacaaagtctactatggtaatgctttagatcaagctatttccatgtgggccttagttatttctgtaacctctaactattctggtgtcgttacgactatcatgtttttagctagagctatagtgtttgtgtgtgttgagtattacccattgttatttattactggcaacaccttacagtgtatcatgcttgtttattgtttcttaggctattgttgctgctgctactttggccttttctgtttactcaaccgttacttcaggcttactcttggtgtttatgactacttggtctctacacaagaatttaggtatatgaactcccaggggcttttgcctcctaagagtagtattgatgctttcaagcttaacattaagttgttgggtattggaggtaaaccatgtatcaaggttgctactgtacagtctaaaatgtctgacgtaaagtgcacatctgtggtactgctctcggttcttcaacaacttagagtagagtcatcttctaaattgtgggcacaatgtgtacaactccacaatgatattcttcttgcaaaagacacaactgaagctttcgagaagatggtttctcttttgtctgttttgctatccatgcagggtgctgtaaacattaataggttgtgcgaggaaatgctcgataaccgtgctactcttcaggctattgcttcagaatttagttctttaccatcatatgccgcttatgccactgcccaggaggcctatgagcaggctgtagctaatggtgattctgaagtcgttctcaaaaagttaaagaaatctttgaatgtggctaaatctgagtttgaccgtgatgctgccatgcaacgcaagttggaaaagatggcagatcaggctatgacccaaatgtacaaacaggcaagatctgaggacaagagggcaaaagtaactagtgctatgcaaacaatgctcttcactatgcttaggaagcttgataatgatgcacttaacaacattatcaacaatgcgcgtgatggttgtgttccactcaacatcataccattgactacagcagccaaactcatggttgttgtccctgattatggtacctacaagaacacttgtgatggtaacacctttacatatgcatctgcactctgggaaatccagcaagttgttgatgcggatagcaagattgttcaacttagtgaaattaacatggacaattcaccaaatttggcttggcctcttattgttacagctctaagagccaactcagctgttaaactacagaataatgaactgagtccagtagcactacgacagatgtcctgtgcggctggtaccacacaaacagcttgtactgatgacaatgcacttgcctactataacaattcgaagggaggtaggtttgtgctggcattactatcagaccaccaagatctcaaatgggctagattccctaagagtgatggtacaggtacaatttacacagaactggaaccaccttgtaggtttgttacagacacaccaaaagggcctaaagtgaaatacttgtacttcatcaaaggcttaaacaacctaaatagaggtatggtgctgggcagtttagctgctacagtacgtcttcaggctggaaatgctacagaagtacctgccaattcaactgtgctttccttctgtgcttttgcagtagaccctgctaaagcatataaggattacctagcaagtggaggacaaccaatcaccaactgtgtgaagatgttgtgtacacacactggtacaggacaggcaattactgtaacaccagaagctaacatggaccaagagtcctttggtggtgcttcatgttgtctgtattgtagatgccacattgaccatccaaatcctaaaggattctgtgacttgaaaggtaagtacgtccaaatacctaccacttgtgctaatgacccagtgggttttacacttagaaacacagtctgtaccgtctgcggaatgtggaaaggttatggctgtagttgtgaccaactccgcgaacccttgatgcagtctgcggatgcatcaacgtttttaaacgggtttgcggtgtaagtgcagcccgtcttacaccgtgcggcacaggcactagtactgatgtcgtctacagggcttttgatatttacaacgaaaaagttgctggttttgcaaagttcctaaaaactaattgctgtcgcttccaggagaaggatgaggaaggcaatttattagactcttactttgtagttaagaggcatactatgtctaactaccaacatgaagagactatttataacttggttaaagattgtccagcggttgctgtccatgactttttcaagtttagagtagatggtgacatggtaccacatatatcacgtcagcgtctaactaaatacacaatggctgatttagtctatgctctacgtcattttgatgagggtaattgtgatacattaaaagaaatactcgtcacatacaattgctgtgatgatgattatttcaataagaaggattggtatgacttcgtagagaatcctgacatcttacgcgtatatgctaacttaggtgagcgtgtacgccaatcattattaaagactgtacaattctgcgatgctatgcgtgatgcaggcattgtaggcgtactgacattagataatcaggatcttaatgggaactggtacgatttcggtgatttcgtacaagtagcaccaggctgcggagttcctattgtggattcatattactcattgctgatgcccatcctcactttgactagggcattggctgctgagtcccatatggatgctgatctcgcaaaaccacttattaagtgggatttgctgaaatatgattttacggaagagagactttgtctcttcgaccgttattttaaatattgggaccagacataccatcccaattgtattaactgtttggatgataggtgtatccttcattgtgcaaactttaatgtgttattttctactgtgtttccacctacaagttttggaccactagtaagaaaaatatttgtagatggtgttccttttgttgtttcaactggataccattttcgtgagttaggagtcgtacataatcaggatgtaaacttacatagctcgcgtctcagtttcaaggaacttttagtgtatgctgctgatccagctatgcatgcagcttctggcaatttattgctagataaacgcactacatgcttttcagtagctgcactaacaaacaatgttgcttttcaaactgtcaaacccggtaattttaataaagacttttatgactttgctgtgtctaaaggtttctttaaggaaggaagttctgttgaactaaaacacttcttctttgctcaggatggcaacgctgctatcagtgattatgactattatcgttataatctgccaacaatgtgtgatatcagacaactcctattcgtagttgaagttgttgataaatactttgattgttacgatggtggctgtattaatgccaaccaagtaatcgttaacaatctggataaatcagctggtttcccatttaataaatggggtaaggctagactttattatgactcaatgagttatgaggatcaagatgcacttttcgcgtatactaagcgtaatgtcatccctactataactcaaatgaatcttaagtatgccattagtgcaaagaatagagctcgcaccgtagctggtgtctctatctgtagtactatgacaaatagacagtttcatcagaaattattgaagtcaatagccgccactagaggagctactgtggtaattggaacaagcaagttttacggtggctggcataatatgttaaaaactgtttacagtgatgtagaaactccacaccttatgggttgggattatccaaaatgtgacagagccatgcctaacatgcttaggataatggcctctcttgttcttgctcgcaaacataacacttgctgtaacttatcacaccgtttctacaggttagctaacgagtgtgcgcaagtattaagtgagatggtcatgtgtggcggctcactatatgttaaaccaggtggaacatcatccggtgatgctacaactgcttatgctaatagtgtctttaacatttgtcaagctgttacagccaatgtaaatgcacttctttcaactgatggtaataagatagctgacaagtatgtccgcaatctacaacacaggctctatgagtgtctctatagaaatagggatgttgatcatgaattcgtggatgagttttacgcttacctgcgtaaacatttctccatgatgattctttctgatgatgccgttgtgtgctataacagtaactatgcggctcaaggtttagtagctagcattaagaactttaaggcagttctttattatcaaaataatgtgttcatgtctgaggcaaaatgttggactgagactgaccttactaaaggacctcacgaattttgctcacagcatacaatgctagttaaacaaggagatgattacgtgtacctgccttacccagatccatcaagaatattaggcgcaggctgttttgtcgatgatattgtcaaaacagatggtacacttatgattgaaaggttcgtgtcactggctattgatgcttacccacttacaaaacatcctaatcaggagtatgctgatgtctttcacttgtatttacaatacattagaaagttacatgatgagcttactggccacatgttggacatgtattccgtaatgctaactaatgataacacctcacggtactgggaacctgagttttatgaggctatgtacacaccacatacagtcttgcaggctgtaggtgcttgtgtattgtgcaattcacagacttcacttcgttgcggtgcctgtattaggagaccattcctatgttgcaagtgctgctatgaccatgtcatttcaacatcacacaaattagtgttgtctgttaatccctatgtttgcaatgccccaggttgtgatgtcactgatgtgacacaactgtatctaggaggtatgagctattattgcaagtcacataagcctcccattagttttccattatgtgctaatggtcaggtttttggtttatacaaaaacacatgtgtaggcagtgacaatgtcactgacttcaatgcgatagcaacatgtgattggactaatgctggcgattacatacttgccaacacttgtactgagagactcaagcttttcgcagcagaaacgctcaaagccactgaggaaacatttaagctgtcatatggtattgccactgtacgcgaagtactctctgacagagaattgcatctttcatgggaggttggaaaacctagaccaccattgaacagaaactatgtctttactggttaccgtgtaactaaaaatagtaaagtacagattggagagtacacctttgaaaaaggtgactatggtgatgctgttgtgtacagaggtactacgacatacaagttgaatgttggtgattactttgtgttgacatctcacactgtaatgccacttagtgcacctactctagtgccacaagagcactatgtgagaattactggcttgtacccaacactcaacatctcagatgagttttctagcaatgttgcaaattatcaaaaggtcggcatgcaaaagtactctacactccaaggaccacctggtactggtaagagtcattttgccatcggacttgctctctattacccatctgctcgcatagtgtatacggcatgctctcatgcagctgttgatgccctatgtgaaaaggcattaaaatatttgcccatagataaatgtagtagaatcatacctgcgcgtgcgcgcgtagagtgttttgataaattcaaagtgaattcaacactagaacagtatgttttctgcactgtaaatgcattgccagaaacaactgctgacattgtagtctttgatgaaatctctatggctactaattatgacttgagtgttgtcaatgctagacttcgtgcaaaacactacgtctatattggcgatcctgctcaattaccagccccccgcacattgctgactaaaggcacactagaaccagaatattttaattcagtgtgcagacttatgaaaacaataggtccagacatgttccttggaacttgtcgccgttgtcctgctgaaattgttgacactgtgagtgctttagtttatgacaataagctaaaagcacacaaggagaagtcagctcaatgcttcaaaatgttctacaaaggtgttattacacatgatgtttcatctgcaatcaacagacctcaaataggcgttgtaagagaatttcttacacgcaatcctgcttggagaaaagctgtttttatctcaccttataattcacagaacgctgtagcttcaaaaatcttaggattgcctacgcagactgttgattcatcacagggttctgaatatgactatgtcatattcacacaaactactgaaacagcacactcttgtaatgtcaaccgcttcaatgtggctatcacaagggcaaaaattggcattttgtgcataatgtctgatagagatctttatgacaaactgcaatttacaagtctagaaataccacgtcgcaatgtggctacattacaagcagaaaatgtaactggactttttaaggactgtagtaagatcattactggtcttcatcctacacaggcacctacacacctcagcgttgatataaagttcaagactgaaggattatgtgttgacataccaggcataccaaaggacatgacctaccgtagactcatctctatgatgggtttcaaaatgaattaccaagtcaatggttaccctaatatgtttatcacccgcgaagaagctattcgtcacgttcgtgcgtggattggctttgatgtagagggctgtcatgcaactagagatgctgtgggtactaacctacctctccagctaggattttctacaggtgttaacttagtagctgtaccgactggttatgttgacactgaaaataacacagaattcaccagagttaatgcaaaacctccaccaggtgaccagtttaaacatcttataccactcatgtataaaggcttgccctggaatgtagtgcgtattaagatagtacaaatgctcagtgatacactgaaaggattgtcagacagagtcgtgttcgtcctttgggcgcatggctttgagcttacatcaatgaagtactttgtcaagattggacctgaaagaacgtgttgtctgtgtgacaaacgtgcaacttgcttttctacttcatcagatacttatgcctgctggaatcattctgtgggttttgactatgtctataacccatttatgattgatgttcagcagtggggctttacgggtaaccttcagagtaaccatgaccaacattgccaggtacatggaaatgcacatgtggctagttgtgatgctatcatgactagatgtttagcagtccatgagtgctttgttaagcgcgttgattggtctgttgaataccctattataggagatgaactgagggttaattctgcttgcagaaaagtacaacacatggttgtgaagtctgcattgcttgctgataagtttccagttcttcatgacattggaaatccaaaggctatcaagtgtgtgcctcaggctgaagtagaatggaagttctacgatgctcagccatgtagtgacaaagcttacaaaatagaggaactcttctattcttatgctacacatcacgataaattcactgatggtgtttgtttgttttggaattgtaacgttgatcgttacccagccaatgcaattgtgtgtaggtttgacacaagagtcttgtcaaacttgaacttaccaggctgtgatggtggtagtttgtatgtgaataagcatgcattccacactccagctttcgataaaagtgcatttactaatttaaagcaattgcctttcttttactattctgatagtccttgtgagtctcatggcaaacaagtagtgtcggatattgattatgttccactcaaatctgctacgtgtattacacgatgcaatttaggtggtgctgtttgcagacaccatgcaaatgagtaccgacagtacttggatgcatataatatgatgatttctgctggatttagcctatggatttacaaacaatttgatacttataacctgtggaatacatttaccaggttacagagtttagaaaatgtggcttataatgttgttaataaaggacactttgatggacacgccggcgaagcacctgtttccatcattaataatgctgtttacacaaaggtagatggtattgatgtggagatctttgaaaataagacaacacttcctgttaatgttgcatttgagctttgggctaagcgtaacattaaaccagtgccagagattaagatactcaataatttgggtgttgatatcgctgctaatactgtaatctgggactacaaaagagaagccccagcacatgtgtctacaataggtgtctgcacaatgactgacattgccaagaaacctactgagagtgcttgttcttcacttactgtcttgtttgatggtagagtggaaggacaggtagacctttttagaaacgcccgtaatggtgttttaataacagaaggttcagtcaaaggtctaacaccttcaaagggaccagcacaagctagcgtcaatggagtcacattaattggagaatcagtaaaaacacagtttaactactttaagaaagtagacggcattattcaacagttgcctgaaacctactttactcagagcagagacttagaggattttaagcccagatcacaaatggaaactgactttctcgagctcgctatggatgaattcatacagcgatataagctcgagggctatgccttcgaacacatcgtttatggagatttcagtcatggacaacttggcggtcttcatttaatgataggcttagccaagcgctcacaagattcaccacttaaattagaggattttatccctattgacagcacagtgaaaaattacttcataacagatgcgcaaacaggttcatcaaaatgtgtgtgttctgtgattgatcttttacttgatgactttgtcgagataataaagtcacaagatttgtcagtgatttcaaaagtggtcaaggttacaattgactatgctgaaatttcattcatgctttggtgtaaggatggacatgttgaaaccttctacccaaaactacaagcaagtcaagcgtggcaaccaggtgttgcgatgcctaacttgtacaagatgcaaagaatgcttcttgaaaagtgtgaccttcagaattatggtgaaaatgctgttataccaaaaggaataatgatgaatgtcgcaaagtatactcaactgtgtcaatacttaaatacacttactttagctgtaccctacaacatgagagttattcactttggtgctggctctgataaaggagttgcaccaggtacagctgtgctcagacaatggttgccaactggcacactacttgtcgattcagatcttaatgacttcgtctccgacgcagattctactttaattggagactgtgcaacagtacatacggctaataaatgggaccttattattagcgatatgtatgaccctaggaccaaacatgtgacaaaagagaatgactctaaagaagggtttttcacttatctgtgtggatttataaagcaaaaactacccctgggtggttctatagctgtaaagataacagagcattcttggaatgctgacctttacaagcttatgggccatttctcatggtggacagcttttgttacaaatgtaaatgcatcatcatcggaagcatttttaattggggctaactatcttggcaagccgaaggaacaaattgatggctataccatgcatgctaactacattttctggaggaacacaaatcctatccagttgtcttcctattcactctttgacatgagcaaatttcctcttaaattaagaggaactgctgtaatgtctcttaaggagaatcaaatcaatgatatgatttattctcttctggaaaaaggtaggcttatcattagagaaaacaacagagttgtggtttcaagtgatattcttgttaacaactaaacgaacatgtttattttcttattatttcttactctcactagtggtagtgaccttgaccggtgcaccacttttgatgatgttcaagctcctaattacactcaacatacttcatctatgaggggggtttactatcctgatgaaatttttagatcagacactctttatttaactcaggatttatttcttccattttattctaatgttacagggtttcatactattaatcatacgtttgacaaccctgtcataccttttaaggatggtatttattttgctgccacagagaaatcaaatgttgtccgtggttgggtttttggttctaccatgaacaacaagtcacagtcggtgattattattaacaattctactaatgttgttatacgagcatgtaactttgaattgtgtgacaaccctttctttgctgtttctaaacccctgggtacacagacacatactatgatattcgataatgcatttaattgcactttcgagtacatatctgatgccttttcgcttgatgtttcagaaaagtcaggtaattttaaacacttacgagagtttgtgtttaaaaataaagatgggtttctctatgtttataagggctatcaacctatagatgtagttcgtgatctaccttctggttttaacactttgaaacctatttttaagttgcctcttggtattaacattacaaattttagagccattcttacagccttttcacctgctcaagacacttggggcacgtcagctgcagcctattttgttggctatttaaagccaactacatttatgctcaagtatgatgaaaatggtacaatcacagatgctgttgattgttctcaaaatccacttgctgaactcaaatgctctgttaagagctttgagattgacaaaggaatttaccagacctctaatttcagggttgttccctcaggagatgttgtgagattccctaatattacaaacttgtgtccttttggagaggtttttaatgctactaaattcccttctgtctatgcatgggagagaaaaaaaatttctaattgtgttgctgattactctgtgctctacaactcaacatttttttcaacctttaagtgctatggcgtttctgccactaagttgaatgatctttgcttctccaatgtctatgcagattcttttgtagtcaagggagatgatgtaagacaaatagcgccaggacaaactggtgttattgctgattataattataaattgccagatgatttcatgggttgtgtccttgcttggaatactaggaacattgatgctacttcaactggtaattataattataaatataggtatcttagacatggcaagcttaggccctttgagagagacatatctaatgtgcctttctcccctgatggcaaaccttgcaccccacctgctcttaattgttattggccattaaatgattatggtttttacaccactactggcattggctaccaaccttacagagttgtagtactttcttttgaacttttaaatgcaccggccacggtttgtggaccaaaattatccactgaccttattaagaaccagtgtgtcaattttaattttaatggactcactggtactggtgtgttaactccttcttcaaagagatttcaaccatttcaacaatttggccgtgatgtttctgatttcactgattccgttcgagatcctaaaacatctgaaatattagacatttcaccttgctcttttgggggtgtaagtgtaattacacctggaacaaatgcttcatctgaagttgctgttctatatcaagatgttaactgcactgatgtttctacagcaattcatgcagatcaactcacaccagcttggcgcatatattctactggaaacaatgtattccagactcaagcaggctgtcttataggagctgagcatgtcgacacttcttatgagtgcgacattcctattggagctggcatttgtgctagttaccatacagtttctttattacgtagtactagccaaaaatctattgtggcttatactatgtctttaggtgctgatagttcaattgcttactctaataacaccattgctatacctactaacttttcaattagcattactacagaagtaatgcctgtttctatggctaaaacctccgtagattgtaatatgtacatctgcggagattctactgaatgtgctaatttgcttctccaatatggtagcttttgcacacaactaaatcgtgcactctcaggtattgctgctgaacaggatcgcaacacacgtgaagtgttcgctcaagtcaaacaaatgtacaaaaccccaactttgaaatattttggtggttttaatttttcacaaatattacctgaccctctaaagccaactaagaggtcttttattgaggacttgctctttaataaggtgacactcgctgatgctggcttcatgaagcaatatggcgaatgcctaggtgatattaatgctagagatctcatttgtgcgcagaagttcaatggacttacagtgttgccacctctgctcactgatgatatgattgctgcctacactgctgctctacttcgtggtactgccactgctggatggacatttggtgctggcgctgctcttcaaataccttttgctatgcaaatggcatataggttcaatggcattggagttacccaaaatgttctctatgagaaccaaaaacaaatcgccaaccaatttaacaaggcgattagtcaaattcaagaatcacttacaacaacatcaactgcattgggcaagctgcaagacgttgttaaccagaatgctcaagcattaaacacacttgttaaacaacttagctctaattttggtgcaatttcaagtgtgctaaatgatatcctttcgcgacttgataaagtcgaggcggaggtacaaattgacaggttaattacaggcagacttcaaagccttcaaacctatgtaacacaacaactaatcagggctgctgaaatcagggcttctgctaatcttgctgctactaaaatgtctgagtgtgttcttggacaatcaaaaagagttgacttttgtggaaagggctaccaccttatgtccttcccacaagcagccccgcatggtgttgtcttcctacatgtcacgtatgtgccatcccaggagaggaacttcaccacagcgccagcaatttgtcatgaaggcaaagcatacttccctcgtgaaggtgtttttgtgtttaatggcacttcttggtttattacacagaggaacttcttttctccacaaataattactacagacaatacatttgtctcaggaaattgtgatgtcgttattggcatcattaacaacacagtttatgatcctctgcaacctgagcttgactcattcaaagaagagctggacaagtacttcaaaaatcatacatcaccagatgttgatcttggcgacatttcaggcattaacgcttctgtcgtcaacattcaaaaagaaattgaccgcctcaatgaggtcgctaaaaatttaaatgaatcactcattgaccttcaagaattgggaaaatatgagcaatatattaaatggccttggtatgtttggctcggcttcattgctggactaattgccatcgtcatggttacaatcttgctttgttgcatgactagttgttgcagttgcctcaagggtgcatgctcttgtggttcttgctgcaagtttgatgaggatgactctgagccagttctcaagggtgtcaaattacattacacataaacgaacttatggatttgtttatgagattttttactcttgaatcaattactgcacagccagtaaaaattgacaatgcttctcctgcaagtactgttcatgctacagcaacgataccgctacaagcctcactccctttcggatggcttgttattggcgttgcatttcttgctgtttttcagagcgctaccaaaataattgcgctcaataaaagatggcagctagccctttataagggcttccagttcatttgcaatttactgctgctatttgttaccatctattcacatcttttgcttgtcgctgcaggtatggaggcgcaatttttgtacctctatgccttgatatattttctacaatgcatcaacgcatgtagaattattatgagatgttggctttgttggaagtgcaaatccaagaacccattactttatgatgccaactactttgtttgctggcacacacataactatgactactgtataccatataacagtgtcacagatacaattgtcgttactgaaggtgacggcatttcaacaccaaaactcaaagaagactaccaaattggtggttattctgaggataggcactcaggtgttaaagactatgtcgttgtacatggctatttcaccgaagtttactaccagcttgagtctacacaaattactacagacactggtattgaaaatgctacattcttcatctttaacaagcttgttaaagacccaccgaatgtgcaaatacacacaatcgacggctcttcaggagttgctaatccagcaatggatcccatttatgatgagccgacgacgactactagcgtgcctttgtaagcacaagaaagtgagtacgaacttatgtactcattcgtttcggaagaaacaggtacgttaatagttaatagcgtacttctttttcttgctttcgtggtattcttgctagtcacactagccatccttactgcgcttcgattgtgtgcgtactgctgcaatattgttaacgtgagtttagtaaaaccaacggtttacgtctactcgcgtgttaaaaatctgaactcttctgaaggagttcctgatcttctggtctaaacgaactaactattattattattctgtttggaactttaacattgcttatcatggcagacaacggtactattaccgttgaggagcttaaacaactcctggaacaatggaacctagtaataggtttcctattcctagcctggattatgttactacaatttgcctattctaatcggaacaggtttttgtacataataaagcttgttttcctctggctcttgtggccagtaacacttgcttgttttgtgcttgctgctgtctacagaattaattgggtgactggcgggattgcgattgcaatggcttgtattgtaggcttgatgtggcttagctacttcgttgcttccttcaggctgtttgctcgtacccgctcaatgtggtcattcaacccagaaacaaacattcttctcaatgtgcctctccgggggacaattgtgaccagaccgctcatggaaagtgaacttgtcattggtgctgtgatcattcgtggtcacttgcgaatggccggacactccctagggcgctgtgacattaaggacctgccaaaagagatcactgtggctacatcacgaacgctttcttattacaaattaggagcgtcgcagcgtgtaggcactgattcaggttttgctgcatacaaccgctaccgtattggaaactataaattaaatacagaccacgccggtagcaacgacaatattgctttgctagtacagtaagtgacaacagatgtttcatcttgttgacttccaggttacaatagcagagatattgattatcattatgaggactttcaggattgctatttggaatcttgacgttataataagttcaatagtgagacaattatttaagcctctaactaagaagaattattcggagttagatgatgaagaacttatggagttagattatccataaaacgaacatgaaaattattctcttcctgacattgattgtatttacatcttgcgagctatatcactatcaggagtgtgttagaggtacgactgtactactaaaagaaccttgcccatcaggaacatacgagggcaattcaccatttcaccctcttgctgacaataaatttgcactaacttgcactagcacacactttgcttttgcttgtgctgacggtactcgacatacctatcagctgcgtgcaagatcagtttcaccaaaacttttcatcagacaagaggaggttcaacaagagctctactcgccactttttctcattgttgctgctctagtatttttaatactttgcttcaccattaagagaaagacagaatgaatgagctcactttaattgacttctatttgtgctttttagcctttctgctattccttgttttaataatgcttattatattttggttttcactcgaaatccaggatctagaagaaccttgtaccaaagtctaaacgaacatgaaacttctcattgttttgacttgtatttctctatgcagttgcatacgcactgtagtacagcgctgtgcatctaataaacctcatgtgcttgaagatccttgtaaggtacaacactaggggtaatacttatagcactgcttggctttgtgctctaggaaaggttttaccttttcatagatggcacactatggttcaaacatgcacacctaatgttactatcaactgtcaagatccagctggtggtgcgcttatagctaggtgttggtaccttcatgaaggtcaccaaactgctgcatttagagacgtacttgttgttttaaataaacgaacaaattaaaatgtctgataatggaccccaatcaaaccaacgtagtgccccccgcattacatttggtggacccacagattcaactgacaataaccagaatggaggacgcaatggggcaaggccaaaacagcgccgaccccaaggtttacccaataatactgcgtcttggttcacagctctcactcagcatggcaaggaggaacttagattccctcgaggccagggcgttccaatcaacaccaatagtggtccagatgaccaaattggctactaccgaagagctacccgacgagttcgtggtggtgacggcaaaatgaaagagctcagccccagatggtacttctattacctaggaactggcccagaagcttcacttccctacggcgctaacaaagaaggcatcgtatgggttgcaactgagggagccttgaatacacccaaagaccacattggcacccgcaatcctaattacaatgctgccaccgtgctacaacttcctcaaggaacaacattgccaaaaggcttctacgcagagggaagcagaggcggcagtcaagcctcttctcgctcctcatcacgtagtcgcggtaattcaagaaattcaactcctggcagcagtaggggaaattctcctgctcgaatggctagcggaggtggtgaaactgccctcgcgctattgctgctagacagattgaaccagcttgagagcaaagtttctggtaaaggccaacaacaacaaggccaaactgtcactaagaaatctgctgctgaggcatctaaaaagcctcgccaaaaacgtactgccacaaaacagtacaacgtcactcaagcatttgggagacgtggtccagaacaaacccaaggaaatttcggggaccaagacctaatcagacaaggaactgattacaaacattggccgcaaattgcacaatttgctccaagtgcctctgcattctttggaatgtcacgcattggcatggaagtcacaccttcgggaacatggctgacttatcatggagccattaaattggatgacaaagatccacaattcaaagacaacgtcatactgctgaacaagcacattgacgcatacaaaacattcccaccaacagagcctaaaaaggacaaaaagaaaaagactgatgaagctcagcctttgccgcagagacaaaagaagcagcccactgtgactcttcttcctgcggctgacatggatgatttctccagacaacttcaaaattccatgagtggagcttctgctgattcaactcaggcataaacactcatgatgaccacacaaggcagatgggctatgtaaacgttttcgcaattccgtttacgatacatagtctactcttgtgcagaatgaattctcgtaactaaacagcacaagtaggtttagttaactttaatctcacatagcaatctttaatcaatgtgtaacattagggaggacttgaaagagccaccacattttcatcgaggccacgcggagtacgatcgagggtacagtgaataatgctagggagagctgcctatatggaagagccctaatgtgtaaaattaattttagtagtgctatccccatgtgattttaatagcttcttaggagaatgacaaaaaaaaaaaaaaaaa

SEQ ID NO: 29771 - DNA, 29732 bp, SARS Coronavirus
tacccaggaaaagccaaccaacctcgatctcttgtagatctgttctctaaacgaactttaaaatctgtgtagctgtcgctcggctgcatgcctagtgcacctacgcagtataaacaataataaattttactgtcgttgacaagaaacgagtaactcgtccctcttctgcagactgcttacggtttcgtccgtgttgcagtcgatcatcagcatacctaggtttcgtccgggtgtgaccgaaaggtaagatggagagccttgttcttggtgtcaacgagaaaacacacgtccaactcagtttgcctgtccttcaggttagagacgtgctagtgcgtggcttcggggactctgtggaagaggccctatcggaggcacgtgaacacctcaaaaatggcacttgtggtctagtagagctggaaaaaggcgtactgccccagcttgaacagccctatgtgttcattaaacgttctgatgccttaagcaccaatcacggccacaaggtcgttgagctggttgcagaaatggacggcattcagtacggtcgtagcggtataacactgggagtactcgtgccacatgtgggcgaaaccccaattgcataccgcaatgttcttcttcgtaagaacggtaataagggagccggtggtcatagctatggcatcgatctaaagtcttatgacttaggtgacgagcttggcactgatcccattgaagattatgaacaaaactggaacactaagcatggcagtggtgcactccgtgaactcactcgtgagctcaatggaggtgcagtcactcgctatgtcgacaacaatttctgtggcccagatgggtaccctcttgattgcatcaaagattttctcgcacgcgcgggcaagtcaatgtgcactctttccgaacaacttgattacatcgagtcgaagagaggtgtctactgctgccgtgaccatgagcatgaaattgcctggttcactgagcgctctgataagagctacgagcaccagacacccttcgaaattaagagtgccaagaaatttgacactttcaaaggggaatgcccaaagtttgtgtttcctcttaactcaaaagtcaaagtcattcaaccacgtgttgaaaagaaaaagactgagggtttcatggggcgtatacgctctgtgtacccttttgcatctccacaggagtgtaacaatatgcacttgtctaccttgatgaaatgtaatcattgcgatgaagtttcatggcagacgtgcgactttctgaaagccacttgtgaacattgtggcactgaaaatttagttattgaaggacctactacatgtgggtacctacctactaatgctgtagtgaaaatgccatgtcctgcctgtcaagacccagagattggacctgagcatagtgttgcagattatcacaaccactcaaacattgaaactcgactccgcaagggaggtaggactagatgttttggaggctgtgtgtttgcctatgttggctgctataataagcgtgcctactgggttcctcgtgctagtgctgatattggctcaggccatactggcattactggtgacaatgtggagaccttgaatgaggatctccttgagatactgagtcgtgaacgtgttaacattaacattgttggcgattttcatttgaatgaagaggttgccatcattttggcatctttctctgcttctacaagtgcctttattgacactataaagagtcttgattacaagtctttcaaaaccattgttgagtcctgcggtaactataaagttaccaagggaaagcccgtaaaaggtgcttggaacattggacaacagagatcagttttaacaccactgtgtggttttccctcacaggctgctggtgttatcagatcaatttttgcgcgcacacttgatgcagcaaaccactcaattcctgatttgcaaagagcagctgtcaccatacttgatggtatttctgaacagtcattacgtcttgtcgacgccatggtttatacttcagacctgctcaccaacagtgtcattattatggcatatgtaactggtggtcttgtacaacagacttctcagtggttgtctaatcttttgggcactactgttgaaaaactcaggcctatctttgaatggattgaggcgaaacttagtgcaggagttgaatttctcaaggatgcttgggagattctcaaatttctcattacaggtgtttttgacatcgtcaagggtcaaatacaggttgcttcagataacatcaaggattgtgtaaaatgcttcattgatgttgttaacaaggcactcgaaatgtgcattgatcaagtcactatcgctggcgcaaagttgcgatcactcaacttaggtgaagtcttcatcgctcaaagcaagggactttaccgtcagtgtatacgtggcaaggagcagctgcaactactcatgcctcttaaggcaccaaaagaagtaacctttcttgaaggtgattcacatgacacagtacttacctctgaggaggttgttctcaagaacggtgaactcgaagcactcgagacgcccgttgatagcttcacaaatggagctatcgttggcacaccagtctgtgtaaatggcctcatgctcttagagattaaggacaaagaacaatactgcgcattgtctcctggtttactggctacaaacaatgtctttcgcttaaaagggggtgcaccaattaaaggtgtaacctttggagaagatactgtttgggaagttcaaggttacaagaatgtgagaatcacatttgagcttgatgaacgtgttgacaaagtgcttaatgaaaagtgctctgtctacactgttgaatccggtaccgaagttactgagtttgcatgtgttgtagcagaggctgttgtgaagactttacaaccagtttctgatctccttaccaacatgggtattgatcttgatgagtggagtgtagctacattctacttatttgatgatgctggtgaagaaaacttttcatcacgtatgtattgttccttttaccctccagatgaggaagaagaggacgatgcagagtgtgaggaagaagaaattgatgaaacctgtgaacatgagtacggtacagaggatgattatcaaggtctccctctggaatttggtgcctcagctgaaacagttcgagttgaggaagaagaagaggaagactggctggatgatactactgagcaatcagagattgagccagaaccagaacctacacctgaagaaccagttaatcagtttactggttatttaaaacttactgacaatgttgccattaaatgtgttgacatcgttaaggaggcacaaagtgctaatcctatggtgattgtaaatgctgctaacatacacctgaaacatggtggtggtgtagcaggtgcactcaacaaggcaaccaatggtgccatgcaaaaggagagtgatgattacattaagctaaatggccctcttacagtaggagggtcttgtttgctttctggacataatcttgctaagaagtgtctgcatgttgttggacctaacctaaatgcaggtgaggacatccagcttcttaaggcagcatatgaaaatttcaattcacaggacatcttacttgcaccattgttgtcagcaggcatatttggtgctaaaccacttcagtctttacaagtgtgcgtgcagacggttcgtacacaggtttatattgcagtcaatgacaaagctctttatgagcaggttgtcatggattatcttgataacctgaagcctagagtggaagcacctaaacaagaggagccaccaaacacagaagattccaaaactgaggagaaatctgtcgtacagaagcctgtcgatgtgaagccaaaaattaaggcctgcattgatgaggttaccacaacactggaagaaactaagtttcttaccaataagttactcttgtttgctgatatcaatggtaagctttaccatgattctcagaacatgcttagaggtgaagatatgtctttccttgagaaggatgcaccttacatggtaggtgatgttatcactagtggtgatatcacttgtgttgtaataccctccaaaaaggctggtggcactactgagatgctctcaagagctttgaagaaagtgccagttgatgagtatataaccacgtaccctggacaaggatgtgctggttatacacttgaggaagctaagactgctcttaagaaatgcaaatctgcattttatgtactaccttcagaagcacctaatgctaaggaagagattctaggaactgtatcctggaatttgagagaaatgcttgctcatgctgaagagacaagaaaattaatgcctatatgcatggatgttagagccataatggcaaccatccaacgtaagtataaaggaattaaaattcaagagggcatcgttgactatggtgtccgattcttcttttatactagtaaagagcctgtagcttctattattacgaagctgaactctctaaatgagccgcttgtcacaatgccaattggttatgtgacacatggttttaatcttgaagaggctgcgcgctgtatgcgttctcttaaagctcctgccgtagtgtcagtatcatcaccagatgctgttactacatataatggatacctcacttcgtcatcaaagacatctgaggagcactttgtagaaacagtttctttggctggctcttacagagattggtcctattcaggacagcgtacagagttaggtgttgaatttcttaagcgtggtgacaaaattgtgtaccacactctggagagccccgtcgagtttcatcttgacggtgaggttctttcacttgacaaactaaagagtctcttatccctgcgggaggttaagactataaaagtgttcacaactgtggacaacactaatctccacacacagcttgtggatatgtctatgacatatggacagcagtttggtccaacatacttggatggtgctgatgttacaaaaattaaacctcatgtaaatcatgagggtaagactttctttgtactacctagtgatgacacactacgtagtgaagctttcgagtactaccatactcttgatgagagttttcttggtaggtacatgtctgctttaaaccacacaaagaaatggaaatttcctcaagttggtggtttaacttcaattaaatgggctgataacaattgttatttgtctagtgttttattagcacttcaacagcttgaagtcaaattcaatgcaccagcacttcaagaggcttattatagagcccgtgctggtgatgctgctaacttttgtgcactcatactcgcttacagtaataaaactgttggcgagcttggtgatgtcagagaaactatgacccatcttctacagcatgctaatttggaatctgcaaagcgagttcttaatgtggtgtgtaaacattgtggtcagaaaactactaccttaacgggtgtagaagctgtgatgtatatgggtactctatcttatgataatcttaagacaggtgtttccattccatgtgtgtgtggtcgtgatgctacacaatatctagtacaacaagagtcttcttttgttatgatgtctgcaccacctgctgagtataaattacagcaaggtacattcttatgtgcgaatgagtacactggtaactatcagtgtggtcattacactcatataactgctaaggagaccctctatcgtattgacggagctcaccttacaaagatgtcagagtacaaaggaccagtgactgatgttttctacaaggaaacatcttacactacaaccatcaagcctgtgtcgtataaactcgatggagttacttacacagagattgaaccaaaattggatgggtattataaaaaggataatgcttactatacagagcagcctatagaccttgtaccaactcaaccattaccaaatgcgagttttgataatttcaaactcacatgttctaacacaaaatttgctgatgatttaaatcaaatgacaggcttcacaaagccagcttcacgagagctatctgtcacattcttcccagacttgaatggcgatgtagtggctattgactatagacactattcagcgagtttcaagaaaggtgctaaaatactgcataagccaattgtttggcacattaaccaggctacaaccaagacaacgttcaaaccaaacacttggtgtttacgttgtctttggagtacaaagccagtagatacttcaaattcatttgaagttctggcagtagaagacacacaaggaatggacaatcttgcttgtgaaagtcaacaacccacctctgaagaagtagtggaaaatcctaccatacagaaggaagtcatagagtgtgacgtgaaaactaccgaagttgtaggcaatgtcatacttaaaccatcagatgaaggtgttaaagtaacacaagagttaggtcatgaggatcttatggctgcttatgtggaaaacacaagcattaccattaagaaacctaatgagctttcactagccttaggtttaaaaacaattgccactcatggtattgctgcaattaatagtgttccttggagtaaaattttggcttatgtcaaaccattcttaggacaagcagcaattacaacatcaaattgcgctaagagattagcacaacgtgtgtttaacaattatatgccttatgtgtttacattattgttccaattgtgtacttttactaaaagtaccaattctagaattagagcttcactacctacaactattgctaaaaatagtgttaagagtgttgctaaattatgtttggatgccggcattaattatgtgaagtcacccaaattttctaaattgttcacaatcgctatgtggctattgttgttaagtatttgcttaggttctctaatctgtgtaactgctgcttttggtgtactcttatctaattttggtgctccttcttattgtaatggcgttagagaattgtatcttaattcgtctaacgttactactatggatttctgtgaaggttcttttccttgcagcatttgtttaagtggattagactcccttgattcttatccagctcttgaaaccattcaggtgacgatttcatcgtacaagctagacttgacaattttaggtctggccgctgagtgggttttggcatatatgttgttcacaaaattcttttatttattaggtctttcagctataatgcaggtgttctttggctattttgctagtcatttcatcagcaattcttggctcatgtggtttatcattagtattgtacaaatggcacccgtttctgcaatggttaggatgtacatcttctttgcttctttctactacatatggaagagctatgttcatatcatggatggttgcacctcttcgacttgcatgatgtgctataagcgcaatcgtgccacacgcgttgagtgtacaactattgttaatggcatgaagagatctttctatgtctatgcaaatggaggccgtggcttctgcaagactcacaattggaattgtctcaattgtgacacattttgcactggtagtacattcattagtgatgaagttgctcgtgatttgtcactccagtttaaaagaccaatcaaccctactgaccagtcatcgtatattgttgatagtgttgctgtgaaaaatggcgcgcttcacctctactttgacaaggctggtcaaaagacctatgagagacatccgctctcccattttgtcaatttagacaatttgagagctaacaacactaaaggttcactgcctattaatgtcatagtttttgatggcaagtccaaatgcgacgagtctgcttctaagtctgcttctgtgtactacagtcagctgatgtgccaacctattctgttgcttgaccaagctcttgtatcagacgttggagatagtactgaagtttccgttaagatgtttgatgcttatgtcgacaccttttcagcaacttttagtgttcctatggaaaaacttaaggcacttgttgctacagctcacagcgagttagcaaagggtgtagctttagatggtgtcctttctacattcgtgtcagctgcccgacaaggtgttgttgataccgatgttgacacaaaggatgttattgaatgtctcaaactttcacatcactctgacttagaagtgacaggtgacagttgtaacaatttcatgctcacctataataaggttgaaaacatgacgcccagagatcttggcgcatgtattgactgtaatgcaaggcatatcaatgcccaagtagcaaaaagtcacaatgtttcactcatctggaatgtaaaagactacatgtctttatctgaacagctgcgtaaacaaattcgtagtgctgccaagaagaacaacataccttttagactaacttgtgctacaactagacaggttgtcaatgtcataactactaaaatctcactcaagggtggtaagattgttagtacttgttttaaacttatgcttaaggccacattattgtgcgttcttgctgcattggtttgttatatcgttatgccagtacatacattgtcaatccatgatggttacacaaatgaaatcattggttacaaagccattcaggatggtgtcactcgtgacatcatttctactgatgattgttttgcaaataaacatgctggttttgacgcatggtttagccagcgtggtggttcatacaaaaatgacaaaagctgccctgtagtagctgctatcattacaagagagattggtttcatagtgcctggcttaccgggtactgtgctgagagcaatcaatggtgacttcttgcattttctacctcgtgtttttagtgctgttggcaacatttgctacacaccttccaaactcattgagtatagtgattttgctacctctgcttgcgttcttgctgctgagtgtacaatttttaaggatgctatgggcaaacctgtgccatattgttatgacactaatttgctagagggttctatttcttatagtgagcttcgtccagacactcgttatgtgcttatggatggttccatcatacagtttcctaacacttacctggagggttctgttagagtagtaacaacttttgatgctgagtactgtagacatggtacatgcgaaaggtcagaagtaggtatttgcctatctaccagtggtagatgggttcttaataatgagcattacagagctctatcaggagttttctgtggtgttgatgcgatgaatctcatagctaacatctttactcctcttgtgcaacctgtgggtgctttagatgtgtctgcttcagtagtggctggtggtattattgccatattggtgacttgtgctgcctactactttatgaaattcagacgtgtttttggtgagtacaaccatgttgttgctgctaatgcacttttgtttttgatgtctttcactatactctgtctggtaccagcttacagctttctgccgggagtctactcagtcttttacttgtacttgacattctatttcaccaatgatgtttcattcttggctcaccttcaatggtttgccatgttttctcctattgtgcctttttggataacagcaatctatgtattctgtatttctctgaagcactgccattggttctttaacaactatcttaggaaaagagtcatgtttaatggagttacatttagtaccttcgaggaggctgctttgtgtacctttttgctcaacaaggaaatgtacctaaaattgcgtagcgagacactgttgccacttacacagtataacaggtatcttgctctatataacaagtacaagtatttcagtggagtcttagatactaccagctatcgtgaagcagcttgctgccacttagcaaaggctctaaatgactttagcaactcaggtgctgatgttctctaccaaccaccacagacatcaatcacttctgctgttctgcagagtggttttaggaaaatggcattcccgtcaggcaaagttgaagggtgcatggtacaagtaacctgtggaactacaactcttaatggattgtggttggatgacacagtatactgtccaagacatgtcatttgcacagcagaagacatgcttaatcctaactatgaagatctgctcattcgcaaatccaaccatagctttcttgttcaggctggcaatgttcaacttcgtgttattggccattctatgcaaaattgtctgcttaggcttaaagttgatacttctaaccctaagacacccaagtataaatttgtccgtatccaacctggtcaaacattttcagttctagcatgctacaatggttcaccatctggtgtttatcagtgtgccatgagacctaatcataccattaaaggttctttccttaatggatcatgtggtagtgttggttttaacattgattatgattgcgtgtctttctgctatatgcatcatatggagcttccaacaggagtacacgctggtactgacttagaaggtaaattctatggtccatttgttgacagacaaactgcacaggctgcaggtacagacacaaccataacattaaatgttttggcatggctgtatgctgctgttatcaatggtgataggtggtttcttaatagattcaccactactttgaatgactttaaccttgtggcaatgaagtacaactatgaacctttgacacaagatcatgttgaaatattgggacctctttctgctcaaacaggaattgccgtcttagatatgtgtgctgctttgaaagagctgctgcagaatggtatgaatggtcgtactatccttggtagcactattttagaagatgagtttacaccatttgatgttgttagacaatgctctggtgttaccttccaaggtaagttcaagaaaattgttaagggcactcatcattggatgcttttaactttcttgacatcactattgattcttgttcaaagtacacagtggtcactgtttttctttgtttacgagaatgctttcttgccatttactcttggtattatggcaattgctgcatgtgctatgctgcttgttaagcataagcacgcattcttgtgcttgtttctgttaccttctcttgcaacagttgcttactttaatatggtctacatgcctgctagctgggtgatgcgtatcatgacatggcttgaattggctgacactagcttgtctggttataggcttaaggattgtgttatgtatgcttcagctttagttttgcttattctcatgacagctcgcactgtttatgatgatgctgctagacgtgtttggacactgatgaatgtcattacacttgtttacaaagtctactatggtaatgctttagatcaagctatttccatgtgggccttagttatttctgtaacctctaactattctggtgtcgttacgactatcatgtttttagctagagctatagtgtttgtgtgtgttgagtattacccattgttatttattactggcaacaccttacagtgtatcatgcttgtttattgtttcttaggctattgttgctgctgctactttggccttttctgtttactcaaccgttacttcaggcttactcttggtgtttatgactacttggtctctacacaagaatttaggtatatgaactcccaggggcttttgcctcctaagagtagtattgatgctttcaagcttaccattaagttgttgggtattggaggtaaaccatgtatcaaggttgctactgtacagtctaaaatgtctgacgtaaagtgcacatctgtggtactgctctcggttcttcaacaacttagagtagagtcatcttctaaattgtgggcacaatgtgtacaactccacaatgatattcttcttgcaaaagacacaactgaagctttcgagaagatggtttctcttttgtctgttttgctatccatgcagggtgctgtagacattaataggttgtgcgaggaaatgctcgataaccgtgctactcttcaggctattgcttcagaatttagttctttaccatcatatgccgcttatgccactgcccaggaggcctatgagcaggctgtagctaatggtgattctgaagtcgttctcaaaaagttaaagaaatctttgaatgtggctaaatctgagtttgaccgtgatgctgccatgcaacgcaagttggaaaagatggcagatcaggctatgacccaaatgtacaaacaggcaagatctgaggacaagagggcaaaagtaactagtgctatgcaaacaatgctcttcactatgcttaggaagcttgataatgatgcacttaacaacattatcaacaatgcgcgtgatggttgtgttccactcaacatcataccattgactacagcagccaaactcatggttgttgtccctgattatggtacctacaagaacacttgtgatggtaacacctttacatatgcatctgcactctgggaaatccagcaagttgttgatgcggatagcaagattgttcaacttagtgaaattaacatggacaattcaccaaatttggcttggcctcttattgttacagctctaagagccaactcagctgttaaactacagaataatgaactgagtccagtagcactacgacagatgtcctgtgcggctggtaccacacaaacagcttgtactgatgacaatgcacttgcctactataacaattcgaagggaggtaggtttgtgctggcattactatcagaccaccaagatctcaaatgggctagattccctaagagtgatggtacaggtacaatttacacagaactggaaccaccttgtaggtttgttacagacacaccaaaagggcctaaagtgaaatacttgtacttcatcaaaggcttaaacaacctaaatagaggtatggtgctgggcagtttagctgctacagtacgtcttcaggctggaaatgctacagaagtacctgccaattcaactgtgctttccttctgtgcttttgcagtagaccctgctaaagcatataaggattacctagcaagtggaggacaaccaatcaccaactgtgtgaagatgttgtgtacacacactggtacaggacaggcaattactgtaacaccagaagctaacatggaccaagagtcctttggtggtgcttcatgttgtctgtattgtagatgccacattgaccatccaaatcctaaaggattctgtgacttgaaaggtaagtacgtccaaatacctaccacttgtgctaatgacccagtgggttttacacttagaaacacagtctgtaccgtctgcggaatgtggaaaggttatggctgtagttgtgaccaactccgcgaacccttgatgcagtctgcggatgcatcaacgtttttaaacgggtttgcggtgtaagtgcagcccgtcttacaccgtgcggcacaggcactagtactgatgtcgtctacagggcttttgatatttacaacgaaaaagttgctggttttgcaaagttcctaaaaactaattgctgtcgcttccaggagaaggatgaggaaggcaatttattagactcttactttgtagttaagaggcatactatgtctaactaccaacatgaagagactatttataacttggttaaagattgtccagcggttgctgtccatgactttttcaagtttagagtagatggtgacatggtaccacatatatcacgtcagcgtctaactaaatacacaatggctgatttagtctatgctctacgtcattttgatgagggtaattgtgatacattaaaagaaatactcgtcacatacaattgctgtgatgatgattatttcaataagaaggattggtatgacttcgtagagaatcctgacatcttacgcgtatatgctaacttaggtgagcgtgtacgccaatcattattaaagactgtacaattctgcgatgctatgcgtgatgcaggcattgtaggcgtactgacattagataatcaggatcttaatgggaactggtacgatttcggtgatttcgtacaagtagcaccaggctgcggagttcctattgtggattcatattactcattgctgatgcccatcctcactttgactagggcattggctgctgagtcccatatggatgctgatctcgcaaaaccacttattaagtgggatttgctgaaatatgattttacggaagagagactttgtctcttcgaccgttattttaaatattgggaccagacataccatcccaattgtattaactgtttggatgataggtgtatccttcattgtgcaaactttaatgtgttattttctactgtgtttccacctacaagttttggaccactagtaagaaaaatatttgtagatggtgttccttttgttgtttcaactggataccattttcgtgagttaggagtcgtacataatcaggatgtaaacttacatagctcgcgtctcagtttcaaggaacttttagtgtatgctgctgatccagctatgcatgcagcttctggcaatttattgctagataaacgcactacatgcttttcagtagctgcactaacaaacaatgttgcttttcaaactgtcaaacccggtaattttaataaagacttttatgactttgctgtgtctaaaggtttctttaaggaaggaagttctgttgaactaaaacacttcttctttgctcaggatggcaacgctgctatcagtgattatgactattatcgttataatctgccaacaatgtgtgatatcagacaactcctattcgtagttgaagttgttgataaatactttgattgttacgatggtggctgtattaatgccaaccaagtaatcgttaacaatctggataaatcagctggtttcccatttaataaatggggtaaggctagactttattatgactcaatgagttatgaggatcaagatgcacttttcgcgtatactaagcgtaatgtcatccctactataactcaaatgaatcttaagtatgccattagtgcaaagaatagagctcgcaccgtagctggtgtctctatctgtagtactatgacaaatagacagtttcatcagaaattattgaagtcaatagccgccactagaggagctactgtggtaattggaacaagcaagttttacggtggctggcataatatgttaaaaactgtttacagtgatgtagaaactccacaccttatgggttgggattatccaaaatgtgacagagccatgcctaacatgcttaggataatggcctctcttgttcttgctcgcaaacataacacttgctgtaacttatcacaccgtttctacaggttagctaacgagtgtgcgcaagtattaagtgagatggtcatgtgtggcggctcactatatgttaaaccaggtggaacatcatccggtgatgctacaactgcttatgctaatagtgtctttaacatttgtcaagctgttacagccaatgtaaatgcacttctttcaactgatggtaataagatagctgacaagtatgtccgcaatctacaacacaggctctatgagtgtctctatagaaatagggatgttgatcatgaattcgtggatgagttttacgcttacctgcgtaaacatttctccatgatgattctttctgatgatgccgttgtgtgctataacagtaactatgcggctcaaggtttagtagctagcattaagaactttaaggcagttctttattatcaaaataatgtgttcatgtctgaggcaaaatgttggactgagactgaccttactaaaggacctcacgaattttgctcacagcatacaatgctagttaaacaaggagatgattacgtgtacctgccttacccagatccatcaagaatattaggcgcaggctgttttgtcgatgatattgtcaaaacagatggtacacttatgattgaaaggttcgtgtcactggctattgatgcttacccacttacaaaacatcctaatcaggagtatgctgatgtctttcacttgtatttacaatacattagaaagttacatgatgagcttactggccacatgttggacatgtattccgtaatgctaactaatgataacacctcacggtactgggaacctgagttttatgaggctatgtacacaccacatacagtcttgcaggctgtaggtgcttgtgtattgtgcaattcacagacttcacttcgttgcggtgcctgtattaggagaccattcctatgttgcaagtgctgctatgaccatgtcatttcaacatcacacaaattagtgttgtctgttaatccctatgtttgcaatgccccaggttgtgatgtcactgatgtgacacaactgtatctaggaggtatgagctattattgcaagtcacataagcctcccattagttttccattatgtgctaatggtcaggtttttggtttatacaaaaacacatgtgtaggcagtgacaatgtcactgacttcaatgcgatagcaacatgtgattggactaatgctggcgattacatacttgccaacacttgtactgagagactcaagcttttcgcagcagaaacgctcaaagccactgaggaaacatttaagctgtcatatggtattgccactgtacgcgaagtactctctgacagagaattgcatctttcatgggaggttggaaaacctagaccaccattgaacagaaactatgtctttactggttaccgtgtaactaaaaatagtaaagtacagattggagagtacacctttgaaaaaggtgactatggtgatgctgttgtgtacagaggtactacgacatacaagttgaatgttggtgattactttgtgttgacatctcacactgtaatgccacttagtgcacctactctagtgccacaagagcactatgtgagaattactggcttgtacccaacactcaacatctcagatgagttttctagcaatgttgcaaattatcaaaaggtcggcatgcaaaagtactctacactccaaggaccacctggtactggtaagagtcattttgccatcggacttgctctctattacccatctgctcgcatagtgtatacggcatgctctcatgcagctgttgatgccctatgtgaaaaggcattaaaatatttgcccatagataaatgtagtagaatcatacctgcgcgtgcgcgcgtagagtgttttgataaattcaaagtgaattcaacactagaacagtatgttttctgcactgtaaatgcattgccagaaacaactgctgacattgtagtctttgatgaaatctctatggctactaattatgacttgagtgttgtcaatgctagacttcgtgcaaaacactacgtctatattggcgatcctgctcaattaccagccccccgcacattgctgactaaaggcacactagaaccagaatattttaattcagtgtgcagacttatgaaaacaataggtccagacatgttccttggaacttgtcgccgttgtcctgctgaaattgttgacactgtgagtgctttagtttatgacaataagctaaaagcacacaaggagaagtcagctcaatgcttcaaaatgttctacaaaggtgttattacacatgatgtttcatctgcaatcaacagacctcaaataggcgttgtaagagaatttcttacacgcaatcctgcttggagaaaagctgtttttatctcaccttataattcacagaacgctgtagcttcaaaaatcttaggattgcctacgcagactgttgattcatcacagggttctgaatatgactatgtcatattcacacaaactactgaaacagcacactcttgtaatgtcaaccgcttcaatgtggctatcacaagggcaaaaattggcattttgtgcataatgtctgatagagatctttatgacaaactgcaatttacaagtctagaaataccacgtcgcaatgtggctacattacaagcagaaaatgtaactggactttttaaggactgtagtaagatcattactggtcttcatcctacacaggcacctacacacctcagcgttgatataaagttcaagactgaaggattatgtgttgacataccaggcataccaaaggacatgacctaccgtagactcatctctatgatgggtttcaaaatgaattaccaagtcaatggttaccctaatatgtttatcacccgcgaagaagctattcgtcacgttcgtgcgtggattggctttgatgtagagggctgtcatgcaactagagatgctgtgggtactaacctacctctccagctaggattttctacaggtgttaacttagtagctgtaccgactggttatgttgacactgaaaataacacagaattcaccagagttaatgcaaaacctccaccaggtgaccagtttaaacatcttataccactcatgtataaaggcttgccctggaatgtagtgcgtattaagatagtacaaatgctcagtgatacactgaaaggattgtcagacagagtcgtgttcgtcctttgggcgcatggctttgagcttacatcaatgaagtactttgtcaagattggacctgaaagaacgtgttgtctgtgtgacaaacgtgcaacttgcttttctacttcatcagatacttatgcctgctggaatcattctgtgggttttgactatgtctataacccatttatgattgatgttcagcagtggggctttacgggtaaccttcagagtaaccatgaccaacattgccaggtacatggaaatgcacatgtggctagttgtgatgctatcatgactagatgtttagcagtccatgagtgctttgttaagcgcgttgattggtctgttgaataccctattataggagatgaactgagggttaattctgcttgcagaaaagtacaacacatggttgtgaagtctgcattgcttgctgataagtttccagttcttcatgacattggaaatccaaaggctatcaagtgtgtgcctcaggctgaagtagaatggaagttctacgatgctcagccatgtagtgacaaagcttacaaaatagaggaactcttctattcttatgctacacatcacgataaattcactgatggtgtttgtttgttttggaattgtaacgttgatcgttacccagccaatgcaattgtgtgtaggtttgacacaagagtcttgtcaaacttgaacttaccaggctgtgatggtggtagtttgtatgtgaataagcatgcattccacactccagctttcgataaaagtgcatttactaatttaaagcaattgcctttcttttactattctgatagtccttgtgagtctcatggcaaacaagtagtgtcggatattgattatgttccactcaaatctgctacgtgtattacacgatgcaatttaggtggtgctgtttgcagacaccatgcaaatgagtaccgacagtacttggatgcatataatatgatgatttctgctggatttagcctatggatttacaaacaatttgatacttataacctgtggaatacatttaccaggttacagagtttagaaaatgtggcttataatgttgttaataaaggacactttgatggacacgccggcgaagcacctgtttccatcattaataatgctgtttacacaaaggtagatggtattgatgtggagatctttgaaaataagacaacacttcctgttaatgttgcatttgagctttgggctaagcgtaacattaaaccagtgccagagattaagatactcaataatttgggtgttgatatcgctgctaatactgtaatctgggactacaaaagagaagccccagcacatgtgtctacaataggtgtctgcacaatgactgacattgccaagaaacctactgagagtgcttgttcttcacttactgtcttgtttgatggtagagtggaaggacaggtagacctttttagaaacgcccgtaatggtgttttaataacagaaggttcagtcaaaggtctaacaccttcaaagggaccagcacaagctagcgtcaatggagtcacattaattggagaatcagtaaaaacacagtttaactactttaagaaagtagacggcattattcaacagttgcctgaaacctactttactcagagcagagacttagaggattttaagcccagatcacaaatggaaactgactttctcgagctcgctatggatgaattcatacagcgatataagctcgagggctatgccttcgaacacatcgtttatggagatttcagtcatggacaacttggcggtcttcatttaatgataggcttagccaagcgctcacaagattcaccacttaaattagaggattttatccctatggacagcacagtgaaaaattacttcataacagatgcgcaaacaggttcatcaaaatgtgtgtgttctgtgattgatcttttacttgatgactttgtcgagataataaagtcacaagatttgtcagtgatttcaaaagtggtcaaggttacaattgactatgctgaaatttcattcatgctttggtgtaaggatggacatgttgaaaccttctacccaaaactacaagcaagtcaagcgtggcaaccaggtgttgcgatgcctaacttgtacaagatgcaaagaatgcttcttgaaaagtgtgaccttcagaattatggtgaaaatgctgttataccaaaaggaataatgatgaatgtcgcaaagtatactcaactgtgtcaatacttaaatacacttactttagctgtaccctacaacatgagagttattcactttggtgctggctctgataaaggagttgcaccaggtacagctgtgctcagaccatggttgccaactggcacactacttgtcgattcagatcttaatgacttcgtctccgacgcagattctactttaattggagactgtgcaacagtacatacggctaataaatgggaccttattattagcgatatgtatgaccctaggaccaaacatgtgacaaaagagaatgactctaaagaagggtttttcacttatctgtgtggatttataaagcaaaaactagccctgggtggttctatagctgtaaagataacagagcattcttggaatgctgacctttacaagcttatgggccatttctcatggtggacagcttttgttacaaatgtaaatgcatcatcatcggaagcatttttaattggggctaactatcttggcaagccgaaggaccaaattgatggctataccatgcatgctaactacattttctggaggaacacaaatcctatccagttgtcttcctattcactctttgacatgagccaatttcctcttaaattaagaggaactgctgtaatgtctcttaaggagaatcaaatcaatgatatgatttattctcttctggaaaaaggtaggcttatcattagagaaaacaacagagttgtggtttcaagtgatattcttgttaacaactaaacgaacatgtttattttcttattatttcttactctcactagtggtagtgaccttgaccggtgcaccacttttgatgatgttcaagctcctaattacactcaacatacttcatctatgaggggggtttactatcctgatgaaatttttagatcagacactctttatttaactcaggatttatttcttcccttttattctaatgttacagggtttcatactattaatcatacgtttggcaaccctgtcataccttttaaggatggtatttattttgctgccacagagaaatcaaatgttgtccgtggttgggtttttggttctaccatgaacaacaagtcacagtcggtgattattattaacaattctactaatgttgttatacgagcatgtaactttgaattgtgtgacaaccctttctttgctgtttctaaacccatgggtacacagacacatactatgatattcgataatgcatttaattgcactttcgagtacatatctgatgccttttcgcttgatgtttcagaaaagtcaggtaattttaaacacttacgagagtttgtgtttaaaaataaagatgggtttctctatgtttataagggctatcaacctatagatgtagttcgtgatctaccttctggttttaacactttgaaacctatttttaagttgcctcttggtattaacattacaaattttagagccattcttacagccttttcacctgctcaagacacttggggcacgtcagctgcagcctattttgttggctatttaaagccaactacatttatgctcaagtatgatgaaaatggtacaatcacagatgctgttgattgttctcaaaatccacttgctgaactcaaatgctctgttaagagctttgagattgacaaaggaatttaccagacctctaatttcagggttgttccctcaggagatgttgtgagattccctaatattacaaacttgtgtccttttggagaggtttttaatgctactaaattcccttctgtctatgcatgggagagaaaaaaaatttctaattgtgttgctgattactctgtgctctacaactcaacatttttttcaacctttaagtgctatggcgtttctgccactaagttgaatgatctttgcttctccaatgtctatgcagattcttttgtagtcaagggagatgatgtaagacaaatagcgccaggacaaactggtgttattgctgattataattataaattgccagatgatttcatgggttgtgtccttgcttggaatactaggaacattgatgctacttcaactggtaattataattataaatataggtatcttagacatggcaagcttaggccctttgagagagacatatctaatgtgcctttctcccctgatggcaaaccttgcaccccacctgctcttaattgttattggccattaaatgattatggtttttacaccactactggcattggctaccaaccttacagagttgtagtactttcttttgaacttttaaatgcaccggccacggtttgtggaccaaaattatccactgaccttattaagaaccagtgtgtcaattttaattttaatggactcactggtactggtgtgttaactccttcttcaaagagatttcaaccatttcaacaatttggccgtgatgtttctgatttcactgattccgttcgagatcctaaaacatctgaaatattagacatttcaccttgctcttttgggggtgtaagtgtaattacacctggaacaaatgcttcatctgaagttgctgttctatatcaagatgttaactgcactgatgtttctacagcaattcatgcagatcaactcacaccagcttggcgcatatattctactggaaacaatgtattccagactcaagcaggctgtcttataggagctgagcatgtcgacacttcttatgagtgcgacattcctattggagctggcatttgtgctagttaccatacagtttctttattacgtagtactagccaaaaatctattgtggcttatactatgtctttaggtgctgatagttcaattgcttactctaataacaccattgctatacctactaacttttcaattagcattactacagaagtaatgcctgtttctatggctaaaacctccgtagattgtaatatgtacatctgcggagattctactgaatgtgctaatttgcttctccaatatggtagcttttgcacacaactaaatcgtgcactctcaggtattgctgctgaacaggatcgcaacacacgtgaagtgttcgctcaagtcaaacaaatgtacaaaaccccaactttgaaatattttggtggttttaatttttcacaaatattacctgaccctctaaagccaactaagaggtcttttattgaggacttgctctttaataaggtgacactcgctgatgctggcttcatgaagcaatatggcgaatgcctaggtgatattaatgctagagatctcatttgtgcgcagaagttcaatggacttacagtgttgccacctctgctcactgatgatatgattgctgcctacactgctgctctagttagtggtactgccactgctggatggacatttggtgctggcgctgctcttcaaataccttttgctatgcaaatggcatataggttcaatggcattggagttacccaaaatgttctctatgagaaccaaaaacaaatcgccaaccaatttaacaaggcgattagtcaaattcaagaatcacttacaacaacatcaactgcattgggcaagctgcaagacgttgttaaccagaatgctcaagcattaaacacacttgttaaacaacttagctctaattttggtgcaatttcaagtgtgctaaatgatatcctttcgcgacttgataaagtcgaggcggaggtacaaattgacaggttaattacaggcagacttcaaagccttcaaacctatgtaacacaacaactaatcagggctgctgaaatcatggcttctgctaatcttgctgctactaaaatgtctgagtgtgttcttggacaatcaaaaagagttgacttttgtggaaagggctaccaccttatgtccttcccacaagcagccccgcatggtgttgtcttcctacatgtcacgtatgtgccatcccaggagaggaacttcaccacagcgccagcaatttgtcatgaaggcaaagcatacttccctcgtgaaggtgtttttgtgtttaatggcacttcttggtttattacacagaggaacttcttttctccacaaataattactacagacaatacatttgtctcaggaaattgtgatgtcgttattggcatcattaacaacacagtttatgatcctctgcaacctgagcttgactcattcaaagaagagctggacaagtacttcaaaaatcatacatcaccagatgttgatcttggcgacatttcaggcattaacgcttctgtcgtcaacattcaaaaagaaattgaccgcctcaatgaggtcgctaaaaatttaaatgaatcactcattgaccttcaagaattgggaaaatatgagcaatatattaaatggccttggtatgtttggctcggcttcattgctggactaattgccatcgtcatggttacaatcttgctttgttgcatgactagttgttgcagttgcctcaagggtgcatgctcttgtggttcttgctgcaagtttgatgaggatgactctgagccagttctcaagggtgtcaaattacattacacataaacgaacttatggatttgtttatgagattttttactcttggatcaattactgcacagccagtaaaaattgacaatgcttctcctgcaagtactgttcatgctacagcaacgataccgctacaagcctcactccctttcggatggcttgttattggcgttgcatttcttgctgtttttcagagcgctaccaaaataattgcgctcaataaaagatggcagctagccctttataagggcttccagttcatttgcaatttactgctgctatttgttaccatctattcacatcttttgcttgtcgctgcaggtatggaggcgcaatttttgtacctctatgccttgatatattttctacaatgcatcaacgcatgtagaattattatgagatgttggctttgttggaagtgcaaatccaagaacccattactttatgatgccaactactttgtttgctggcacacacataactatgactactgtataccatataacagtgtcacagatacaattgtcgttactgaaggtgacggcatttcaacaccaaaactcaaagaagactaccaaattggtggttattctgaggataggcactcaggtgttaaagactatgtcgttgtacatggctatttcaccgaagtttactaccagcttgagtctacacaaattactacagacactggtattgaaaatgctacattcttcatctttaacaagcttgttaaagacccaccgaatgtgcaaatacacacaatcgacggctcttcaggagttgctaatccagcaatggatccaatttatgatgagccgacgacgactactagcgtgcctttgtaagcacaagaaagtgagtacgaacttatgtactcattcgtttcggaagaaacaggtacgttaatagttaatagcgtacttctttttcttgctttcgtggtattcttgctagtcacactagccatccttactgcgcttcgattgtgtgcgtactgctgcaatattgttaacgtgagtttagtaaaaccaacggtttacgtctactcgcgtgttaaaaatctgaactcttctgaaggagttcctgatcttctggtctaaacgaactaactattattattattctgtttggaactttaacattgcttatcatggcagacaacggtactattaccgttgaggagcttaaacaactcctggaacaatggaacctagtaataggtttcctattcctagcctggattatgttactacaatttgcctattctaatcggaacaggtttttgtacataataaagcttgttttcctctggctcttgtggccagtaacacttgcttgttttgtgcttgctgctgtctacagaattaattgggtgactggcgggattgcgattgcaatggcttgtattgtaggcttgatgtggcttagctacttcgttgcttccttcaggctgtttgctcgtacccgctcaatgtggtcattcaacccagaaacaaacattcttctcaatgtgcctctccgggggacaattgtgaccagaccgctcatggaaagtgaacttgtcattggtgctgtgatcattcgtggtcacttgcgaatggccggacactccctagggcgctgtgacattaaggacctgccaaaagagatcactgtggctacatcacgaacgctttcttattacaaattaggagcgtcgcagcgtgtaggcactgattcaggttttgctgcatacaaccgctaccgtattggaaactataaattaaatacagaccacgccggtagcaacgacaatattgctttgctagtacagtaagtgacaacagatgtttcatcttgttgacttccaggttacaatagcagagatattgattatcattatgaggactttcaggattgctatttggaatcttgacgttataataagttcaatagtgagacaattatttaagcctctaactaagaagaattattcggagttagatgatgaagaacttatggagttagattatccataaaacgaacatgaaaattattctcttcctgacattgattgtatttacatcttgcgagctatatcactatcaggagtgtgttagaggtacgactgtactactaaaagaaccttgcccatcaggaacatacgagggcaattcaccatttcaccctcttgctgacaataaatttgcactaacttgcactagcacacactttgcttttgcttgtgctgacggtactcgacatacctatcagctgcgtgcaagatcagtttcaccaaaacttttcatcagacaagaggaggttcaacaagagctctactcgccactttttctcattgttgctgctctagtatttttaatactttgcttcaccattaagagaaagacagaatgaatgagctcactttaattgacttctatttgtgctttttagcctttctgctattccttgttttaataatgcttattatattttggttttcactcgaaatccaggatctagaagaaccttgtaccaaagtctaaacgaacatgaaacttctcattgttttgacttgtatttctctatgcagttgcatacgcactgtagtacagcgctgtgcatctaataaacctcatgtgcttgaagatccttgtaaggtacaacactaggggtaatacttatagcactgcttggctttgtgctctaggaaaggttttaccttttcatagatggcacactatggttcaaacatgcacacctaatgttactatcaactgtcaagatccagctggtggtgcgcttatagctaggtgttggtaccttcatgaaggtcaccaaactgctgcatttagagacgtacttgttgttttaaataaacgaacaaattaaaatgtctgataatggaccccaatcaaaccaacgtagtgccccccgcattacatttggtggacccacagattcaactgacaataaccagaatggaggacgcaatggggcaaggccaaaacagcgccgaccccaaggtttacccaataatactgcgtcttggttcacagctctcactcagcatggcaaggaggaacttagattccctcgaggccagggcgttccaatcaacaccaatagtggtccagatgaccaaattggctactaccgaagagctacccgacgagttcgtggtggtgacggcaaaatgaaagagctcagccccagatggtacttctattacctaggaactggcccagaagcttcacttccctacggcgctaacaaagaaggcatcgtatgggttgcaactgagggagccttgaatacacccaaagaccacattggcacccgcaatcctaataacaatgctgccaccgtgctacaacttcctcaaggaacaacattgccaaaaggcttctacgcagagggaagcagaggcggcagtcaagcctcttctcgctcctcatcacgtagtcgcggtaattcaagaaattcaactcctggcagcagtaggggaaattctcctgctcgaatggctagcggaggtggtgaaactgccctcgcgctattgctgctagacagattgaaccagcttgagagcaaagtttctggtaaaggccaacaacaacaaggccaaactgtcactaagaaatctgctgctgaggcatctaaaaagcctcgccaaaaacgtactgccacaaaacagtacaacgtcactcaagcatttgggagacgtggtccagaacaaacccaaggaaatttcggggaccaagacctaatcagacaaggaactgattacaaacattggccgcaaattgcacaatttgctccaagtgcctctgcattctttggaatgtcacgcattggcatggaagtcacaccttcgggaacatggctgacttatcatggagccattaaattggatgacaaagatccacaattcaaagacaacgtcatactgctgaacaagcacattgacgcatacaaaacattcccaccaacagagcctaaaaaggacaaaaagaaaaagactgatgaagctcagcctttgccgcagagacaaaagaagcagcccactgtgactcttcttcctgcggctgacatggatgatttctccagacaacttcaaaattccatgagtggagcttctgctgattcaactcaggcataaacactcatgatgaccacacaaggcagatgggctatgtaaacgttttcgcaattccgtttacgatacatagtctactcttgtgcagaatgaattctcgtaactaaacagcacaagtaggtttagttaactttaatctcacatagcaatctttaatcaatgtgtaacattagggaggacttgaaagagccaccacattttcatcgaggccacgcggagtacgatcgagggtacagtgaataatgctagggagagctgcctatatggaagagccctaatgtgtaaaattaattttagtagtgctatccccatgtgattttaatagcttcttaggagaatgacaaaaaaaaaaaaaaaaaaaaa

SEQ ID NO: 29772 - DNA, 1620 bp, SARS Coronavirus
gtaccttcatgaaggtcaccaaactgctgcatttagagacgtacttgttgttttaaataaacgaacaaattaaaatgtctgataatggaccccaatcaaaccaacgtagtgccccccgcattacatttggtggacccacagattcaactgacaataaccagaatggaggacgcaatggggcaaggccaaaacagcgccgaccccaaggtttacccaataatactgcgtcttggttcacagctctcactcagcatggcaaggaggaacttagattccctcgaggccagggcgttccaatcaacaccaatagtggtccagatgaccaaattggctactaccgaagagctacccgacgagttcgtggtggtgacggcaaaatgaaagagctcagccccagatggtacttctattacctaggaactggcccagaagcttcacttccctacggcgctaacaaagaaggcatcgtatgggttgcaactgagggagccttgaatacacccaaagaccacattggcacccgcaatcctaataacaatgctgccaccgtgctacaacttcctcaaggaacaacattgccaaaaggcttctacgcagagggaagcagaggcggcagtcaagcctcttctcgctcctcatcacgtagtcgcggtaattcaagaaattcaactcctggcagcagtaggggaaattctcctgctcgaatggctagcggaggtggtgaaactgccctcgcgctattgctgctagacagattgaaccagcttgagagcaaagtttctggtaaaggccaacaacaacaaggccaaactgtcactaagaaatctgctgctgaggcatctaaaaagcctcgccaaaaacgtactgccacaaaacagtacaacgtcactcaagcatttgggagacgtggtccagaacaaacccaaggaaatttcggggaccaagacctaatcagacaaggaactgattacaaacattggccgcaaattgcacaatttgctccaagtgcctctgcattctttggaatgtcacgcattggcatggaagtcacaccttcgggaacatggctgacttatcatggagccattaaattggatgacaaagatccacaattcaaagacaacgtcatactgctgaacaagcacattgacgcatacaaaacattcccaccaacagagcctaaaaaggacaaaaagaaaaagactgatgaagctcagcctttgccgcagagacaaaagaagcagcccactgtgactcttcttcctgcggctgacatggatgatttctccagacaacttcaaaattccatgagtggagcttctgctgattcaactcaggcataaacactcatgatgaccacacaaggcagatgggctatgtaaacgttttcgcaattccgtttacgatacatagtctactcttgtgcagaatgaattctcgtaactaaacagcacaagtaggtttagttaactttaatctcacatagcaatctttaatcaatgtgtaacattagggaggacttgaaagagccaccacattttcatcgaggccacgcggagtacgatcgagggtacagtgaataatgctagggagagctgcctatatggaagagccctaatg

SEQ ID NO: 29773 - DNA, 29727 bp, SARS Coronavirus
atattaggtttttacctacccaggaaaagccaaccaacctcgatctcttgtagatctgttctctaaacgaactttaaaatctgtgtagctgtcgctcggctgcatgcctagtgcacctacgcagtataaacaataataaattttactgtcgttgacaagaaacgagtaactcgtccctcttctgcagactgcttacggtttcgtccgtgttgcagtcgatcatcagcatacctaggtttcgtccgggtgtgaccgaaaggtaagatggagagccttgttcttggtgtcaacgagaaaacacacgtccaactcagtttgcctgtccttcaggttagagacgtgctagtgcgtggcttcggggactctgtggaagaggccctatcggaggcacgtgaacacctcaaaaatggcacttgtggtctagtagagctggaaaaaggcgtactgccccagcttgaacagccctatgtgttcattaaacgttctgatgccttaagcaccaatcacggccacaaggtcgttgagctggttgcagaaatggacggcattcagtacggtcgtagcggtataacactgggagtactcgtgccacatgtgggcgaaaccccaattgcataccgcaatgttcttcttcgtaagaacggtaataagggagccggtggtcatagctatggcatcgatctaaagtcttatgacttaggtgacgagcttggcactgatcccattgaagattatgaacaaaactggaacactaagcatggcagtggtgcactccgtgaactcactcgtgagctcaatggaggtgcagtcactcgctatgtcgacaacaatttctgtggcccagatgggtaccctcttgattgcatcaaagattttctcgcacgcgcgggcaagtcaatgtgcactctttccgaacaacttgattacatcgagtcgaagagaggtgtctactgctgccgtgaccatgagcatgaaattgcctggttcactgagcgctctgataagagctacgagcaccagacacccttcgaaattaagagtgccaagaaatttgacactttcaaaggggaatgcccaaagtttgtgtttcctcttaactcaaaagtcaaagtcattcaaccacgtgttgaaaagaaaaagactgagggtttcatggggcgtatacgctctgtgtaccctgttgcatctccacaggagtgtaacaatatgcacttgtctaccttgatgaaatgtaatcattgcgatgaagtttcatggcagacgtgcgactttctgaaagccacttgtgaacattgtggcactgaaaatttagttattgaaggacctactacatgtgggtacctacctactaatgctgtagtgaaaatgccatgtcctgcctgtcaagacccagagattggacctgagcatagtgttgcagattatcacaaccactcaaacattgaaactcgactccgcaagggaggtaggactagatgttttggaggctgtgtgtttgcctatgttggctgctataataagcgtgcctactgggttcctcgtgctagtgctgatattggctcaggccatactggcattactggtgacaatgtggagaccttgaatgaggatctccttgagatactgagtcgtgaacgtgttaacattaacattgttggcgattttcatttgaatgaagaggttgccatcattttggcatctttctctgcttctacaagtgcctttattgacactataaagagtcttgattacaagtctttcaaaaccattgttgagtcctgcggtaactataaagttaccaagggaaagcccgtaaaaggtgcttggaacattggacaacagagatcagttttaacaccactgtgtggttttccctcacaggctgctggtgttatcagatcaatttttgcgcgcacacttgatgcagcaaaccactcaattcctgatttgcaaagagcagctgtcaccatacttgatggtatttctgaacagtcattacgtcttgtcgacgccatggtttatacttcagacctgctcaccaacagtgtcattattatggcatatgtaactggtggtcttgtacaacagacttctcagtggttgtctaatcttttgggcactactgttgaaaaactcaggcctatctttgaatggattgaggcgaaacttagtgcaggagttgaatttctcaaggatgcttgggagattctcaaatttctcattacaggtgtttttgacatcgtcaagggtcaaatacaggttgcttcagataacatcaaggattgtgtaaaatgcttcattgatgttgttaacaaggcactcgaaatgtgcattgatcaagtcactatcgctggcgcaaagttgcgatcactcaacttaggtgaagtcttcatcgctcaaagcaagggactttaccgtcagtgtatacgtggcaaggagcagctgcaactactcatgcctcttaaggcaccaaaagaagtaacctttcttgaaggtgattcacatgacacagtacttacctctgaggaggttgttctcaagaacggtgaactcgaaacactcgagacgcccgttgatagcttcacaaatggagctatcgttggcacaccagtctgtgtaaatggcctcatgctcttagagattaaggacaaagaacaatactgcgcattgtctcctggtttactggctacaaacaatgtctttcgcttaaaagggggtgcaccaattaaaggtgtaacctttggagaagatactgtttgggaagttcaaggttacaagaatgtgagaatcacatttgagcttgatgaacgtgttgacaaagtgcttaatgaaaagtgctctgtctacactgttgaatccggtaccgaagttactgagtttgcatgtgttgtagcagaggctgttgtgaagactttacaaccagtttctgatctccttaccaacatgggtattgatcttgatgagtggagtgtagctacattctacttatttgatgatgctggtgaagaaaacttttcatcacgtatgtattgttccttttaccctccagatgaggaagaagaggacgatgcagagtgtgaggaagaagaaattgatgaaacctgtgaacatgagtacggtacagaggatgattatcaaggtctccctctggaatttggtgcctcagctgaaacagttcgagttgaggaagaagaagaggaagactggctggatgatactactgagcaatcagagattgagccagaaccagaacctacacctgaagaaccagttaatcagtttactggttatttaaaacttactgacaatgttgccattaaatgtgttgacatcgttaaggaggcacaaagtgctaatcctatggtgattgtaaatgctgctaacatacacctgaaacatggtggtggtgtagcaggtgcactcaacaaggcaaccaatggtgccatgcaaaaggagagtgatgattacattaagctaaatggccctcttacagtaggagggtcttgtttgctttctggacataatcttgctaagaagtgtctgcatgttgttggacctaacctaaatgcaggtgaggacatccagcttcttaaggcagcatatgaaaatttcaattcacaggacatcttacttgcaccattgttgtcagcaggcatatttggtgctaaaccacttcagtctttacaagtgtgcgtgcagacggttcgtacacaggtttatattgcagtcaatgacaaagctctttatgagcaggttgtcatggattatcttgataacctgaagcctagagtggaagcacctaaacaagaggagccaccaaacacagaagattccaaaactgaggagaaatctgtcgtacagaagcctgtcgatgtgaagccaaaaattaaggcctgcattgatgaggttaccacaacactggaagaaactaagtttcttaccaataagttactcttgtttgctgatatcaatggtaagctttaccatgattctcagaacatgcttagaggtgaagatatgtctttccttgagaaggatgcaccttacatggtaggtgatgttatcactagtggtgatatcacttgtgttgtaataccctccaaaaaggctggtggcactactgagatgctctcaagagctttgaagaaagtgccagttgatgagtatataaccacgtaccctggacaaggatgtgctggttatacacttgaggaagctaagactgctcttaagaaatgcaaatctgcattttatgtactaccttcagaagcacctaatgctaaggaagagattctaggaactgtatcctggaatttgagagaaatgcttgctcatgctgaagagacaagaaaattaatgcctatatgcatggatgttagagccataatggcaaccatccaacgtaagtataaaggaattaaaattcaagagggcatcgttgactatggtgtccgattcttcttttatactagtaaagagcctgtagcttctattattacgaagctgaactctctaaatgagccgcttgtcacaatgccaattggttatgtgacacatggttttaatcttgaagaggctgcgcgctgtatgcgttctcttaaagctcctgccgtagtgtcagtatcatcaccagatgctgttactacatataatggatacctcacttcgtcatcaaagacatctgaggagcactttgtagaaacagtttctttggctggctcttacagagattggtcctattcaggacagcgtacagagttaggtgttgaatttcttaagcgtggtgacaaaattgtgtaccacactctggagagccccgtcgagtttcatcttgacggtgaggttctttcacttgacaaactaaagagtctcttatccctgcgggaggttaagactataaaagtgttcacaactgtggacaacactaatctccacacacagcttgtggatatgtctatgacatatggacagcagtttggtccaacatacttggatggtgctgatgttacaaaaattaaacctcatgtaaatcatgagggtaagactttctttgtactacctagtgatgacacactacgtagtgaagctttcgagtactaccatactcttgatgagagttttcttggtaggtacatgtctgctttaaaccacacaaagaaatggaaatttcctcaagttggtggtttaacttcaattaaatgggctgataacaattgttatttgtctagtgttttattagcacttcaacagcttgaagtcaaattcaatgcaccagcacttcaagaggcttattatagagcccgtgctggtgatgctgctaacttttgtgcactcatactcgcttacagtaataaaactgttggcgagcttggtgatgtcagagaaactatgacccatcttctacagcatgctaatttggaatctgcaaagcgagttcttaatgtggtgtgtaaacattgtggtcagaaaactactaccttaacgggtgtagaagctgtgatgtatatgggtactctatcttatgataatcttaagacaggtgtttccattccatgtgtgtgtggtcgtgatgctacacaatatctagtacaacaagagtcttcttttgttatgatgtctgcaccacctgctgagtataaattacagcaaggtacattcttatgtgcgaatgagtacactggtaactatcagtgtggtcattacactcatataactgctaaggagaccctctatcgtattgacggagctcaccttacaaagatgtcagagtacaaaggaccagtgactgatgttttctacaaggaaacatcttacactacaaccatcaagcctgtgtcgtataaactcgatggagttacttacacagagattgaaccaaaattggatgggtattataaaaaggataatgcttactatacagagcagcctatagaccttgtaccaactcaaccattaccaaatgcgagttttgataatttcaaactcacatgttctaacacaaaatttgctgatgatttaaatcaaatgacaggcttcacaaagccagcttcacgagagctatctgtcacattcttcccagacttgaatggcgatgtagtggctattgactatagacactattcagcgagtttcaagaaaggtgctaaattactgcataagccaattgtttggcacattaaccaggctacaaccaagacaacgttcaaaccaaacacttggtgtttacgttgtctttggagtacaaagccagtagatacttcaaattcatttgaagttctggcagtagaagacacacaaggaatggacaatcttgcttgtgaaagtcaacaacccacctctgaagaagtagtggaaaatcctaccatacagaaggaagtcatagagtgtgacgtgaaaactaccgaagttgtaggcaatgtcatacttaaaccatcagatgaaggtgttaaagtaacacaagagttaggtcatgaggatcttatggctgcttatgtggaaaacacaagcattaccattaagaaacctaatgagctttcactagccttaggtttaaaaacaattgccactcatggtattgctgcaattaatagtgttccttggagtaaaattttggcttatgtcaaaccattcttaggacaagcagcaattacaacatcaaattgcgctaagagattagcacaacgtgtgtttaacaattatatgccttatgtgtttacattattgttccaattgtgtacttttactaaaagtaccaattctagaattagagcttcactacctacaactattgctaaaaatagtgttaagagtgttgctaaattatgtttggatgccggcattaattatgtgaagtcacccaaattttctaaattgttcacaatcgctatgtggctattgttgttaagtatttgcttaggttctctaatctgtgtaactgctgcttttggtgtactcttatctaattttggtgctccttcttattgtaatggcgttagagaattgtatcttaattcgtctaacgttactactatggatttctgtgaaggttcttttccttgcagcatttgtttaagtggattagactcccttgattcttatccagctcttgaaaccattcaggtgacgatttcatcgtacaagctagacttgacaattttaggtctggccgctgagtgggttttggcatatatgttgttcacaaaattcttttatttattaggtctttcagctataatgcaggtgttctttggctattttgctagtcatttcatcagcaattcttggctcatgtggtttatcattagtattgtacaaatggcacccgtttctgcaatggttaggatgtacatcttctttgcttctttctactacatatggaagagctatgttcatatcatggatggttgcacctcttcgacttgcatgatgtgctataagcgcaatcgtgccacacgcgttgagtgtacaactattgttaatggcatgaagagatctttctatgtctatgcaaatggaggccgtggcttctgcaagactcacaattggaattgtctcaattgtgacacattttgcactggtagtacattcattagtgatgaagttgctcgtgatttgtcactccagtttaaaagaccaatcaaccctactgaccagtcatcgtatattgttgatagtgttgctgtgaaaaatggcgcgcttcacctctactttgacaaggctggtcaaaagacctatgagagacatccgctctcccattttgtcaatttagacaatttgagagctaacaacactaaaggttcactgcctattaatgtcatagtttttgatggcaagtccaaatgcgacgagtctgcttctaagtctgcttctgtgtactacagtcagctgatgtgccaacctattctgttgcttgaccaagctcttgtatcagacgttggagatagtactgaagtttccgttaagatgtttgatgcttatgtcgacaccttttcagcaacttttagtgttcctatggaaaaacttaaggcacttgttgctacagctcacagcgagttagcaaagggtgtagctttagatggtgtcctttctacattcgtgtcagctgcccgacaaggtgttgttgataccgatgttgacacaaaggatgttattgaatgtctcaaactttcacatcactctgacttagaagtgacaggtgacagttgtaacaatttcatgctcacctataataaggttgaaaacatgacgcccagagatcttggcgcatgtattgactgtaatgcaaggcatatcaatgcccaagtagcaaaaagtcacaatgtttcactcatctggaatgtaaaagactacatgtctttatctgaacagctgcgtaaacaaattcgtagtgctgccaagaagaacaacataccttttagactaacttgtgctacaactagacaggttgtcaatgtcataactactaaaatctcactcaagggtggtaagattgttagtacttgttttaaacttatgcttaaggccacattattgtgcgttcttgctgcattggtttgttatatcgttatgccagtacatacattgtcaatccatgatggttacacaaatgaaatcattggttacaaagccattcaggatggtgtcactcgtgacatcatttctactgatgattgttttgcaaataaacatgctggttttgacgcatggtttagccagcgtggtggttcatacaaaaatgacaaaagctgccctgtagtagctgctatcattacaagagagattggtttcatagtgcctggcttaccgggtactgtgctgagagcaatcaatggtgacttcttgcattttctacctcgtgtttttagtgctgttggcaacatttgctacacaccttccaaactcattgagtatagtgattttgctacctctgcttgcgttcttgctgctgagtgtacaatttttaaggatgctatgggcaaacctgtgccatattgttatgacactaatttgctagagggttctatttcttatagtgagcttcgtccagacactcgttatgtgcttatggatggttccatcatacagtttcctaacacttacctggagggttctgttagagtagtaacaacttttgatgctgagtactgtagacatggtacatgcgaaaggtcagaagtaggtatttgcctatctaccagtggtagatgggttcttaataatgagcattacagagctctatcaggagttttctgtggtgttgatgcgatgaatctcatagctaacatctttactcctcttgtgcaacctgtgggtgctttagatgtgtctgcttcagtagtggctggtggtattattgccatattggtgacttgtgctgcctactactttatgaaattcagacgtgtttttggtgagtacaaccatgttgttgctgctaatgcacttttgtttttgatgtctttcactatactctgtctggtaccagcttacagctttctgccgggagtctactcagtcttttacttgtacttgacattctatttcaccaatgatgtttcattcttggctcaccttcaatggtttgccatgttttctcctattgtgcctttttggataacagcaatctatgtattctgtatttctctgaagcactgccattggttctttaacaactatcttaggaaaagagtcatgtttaatggagttacatttagtaccttcgaggaggctgctttgtgtacctttttgctcaacaaggaaatgtacctaaaattgcgtagcgagacactgttgccacttacacagtataacaggtatcttgctctatataacaagtacaagtatttcagtggagccttagatactaccagctatcgtgaagcagcttgctgccacttagcaaaggctctaaatgactttagcaactcaggtgctgatgttctctaccaaccaccacagacatcaatcacttctgctgttctgcagagtggttttaggaaaatggcattcccgtcaggcaaagttgaagggtgcatggtacaagtaacctgtggaactacaactcttaatggattgtggttggatgacacagtatactgtccaagacatgtcatttgcacagcagaagacatgcttaatcctaactatgaagatctgctcattcgcaaatccaaccatagctttcttgttcaggctggcaatgttcaacttcgtgttattggccattctatgcaaaattgtctgcttaggcttaaagttgatacttctaaccctaagacacccaagtataaatttgtccgtatccaacctggtcaaacattttcagttctagcatgctacaatggttcaccatctggtgtttatcagtgtgccatgagacctaatcataccattaaaggttctttccttaatggatcatgtggtagtgttggttttaacattgattatgattgcgtgtctttctgctatatgcatcatatggagcttccaacaggagtacacgctggtactgacttagaaggtaaattctatggtccatttgttgacagacaaactgcacaggctgcaggtacagacacaaccataacattaaatgttttggcatggctgtatgctgctgttatcaatggtgataggtggtttcttaatagattcaccactactttgaatgactttaaccttgtggcaatgaagtacaactatgaacctttgacacaagatcatgttgacatattgggacctctttctgctcaaacaggaattgccgtcttagatatgtgtgctgctttgaaagagctgctgcagaatggtatgaatggtcgtactatccttggtagcactattttagaagatgagtttacaccatttgatgttgttagacaatgctctggtgttaccttccaaggtaagttcaagaaaattgttaagggcactcatcattggatgcttttaactttcttgacatcactattgattcttgttcaaagtacacagtggtcactgtttttctttgtttacgagaatgctttcttgccatttactcttggtattatggcaattgctgcatgtgctatgctgcttgttaagcataagcacgcattcttgtgcttgtttctgttaccttctcttgcaacagttgcttactttaatatggtctacatgcctgctagctgggtgatgcgtatcatgacatggcttgaattggctgacactagcttgtctggttataggcttaaggattgtgttatgtatgcttcagctttagttttgcttattctcatgacagctcgcactgtttatgatgatgctgctagacgtgtttggacactgatgaatgtcattacacttgtttacaaagtctactatggtaatgctttagatcaagctatttccatgtgggccttagttatttctgtaacctctaactattctggtgtcgttacgactattatgtttttagctagagctatagtgtttgtgtgtgttgagtattacccattgttatttattactggcaacaccttacagtgtatcatgcttgtttattgtttcttaggctattgttgctgctgctactttggccttttctgtttactcaaccgttacttcaggcttactcttggtgtttatgactacttggtctctacacaagaatttaggtatatgaactcccaggggcttttgcctcctaagagtagtattgatgctttcaagcttaacattaagttgttgggtattggaggtaaaccatgtatcaaggttgctactgtacagtctaaaatgtctgacgtaaagtgcacatctgtggtactgctctcggttcttcaacaacttagagtagagtcatcttctaaattgtgggcacaatgtgtacaactccacaatgatattcttcttgcaaaagacacaactgaagctttcgagaagatggtttctcttttgtctgttttgctatccatgcagggtgctgtagacattaataggttgtgcgaggaaatgctcgataaccgtgctactcttcaggctattgcttcagaatttagttctttaccatcatatgccgcttatgccactgcccaggaggcctatgagcaggctgtagctaatggtgattctgaagtcgttctcaaaaagttaaagaaatctttgaatgtggctaaatctgagtttgaccgtgatgctgccatgcaacgcaagttggaaaagatggcagatcaggctatgacccaaatgtacaaacaggcaagatctgaggacaagagggcaaaagtaactagtgctatgcaaacaatgctcttcactatgcttaggaagcttgataatgatgcacttaacaacattatcaacaatgcgcgtgatggttgtgttccactcaacatcataccattgactacagcagccaaactcatggttgttgtccctgattatggtacctacaagaacacttgtgatggtaacacctttacatatgcatctgcactctgggaaatccagcaagttgttgatgcggatagcaagattgttcaacttagtgaaattaacatggacaattcaccaaatttggcttggcctcttattgttacagctctaagagccaactcagctgttaaactacagaataatgaactgagtccagtagcactacgacagatgtcctgtgcggctggtaccacacaaacagcttgtactgatgacaatgcacttgcctactataacaattcgaagggaggtaggtttgtgctggcattactatcagaccaccaagatctcaaatgggctagattccctaagagtgatggtacaggtacaatttacacagaactggaaccaccttgtaggtttgttacagacacaccaaaagggcctaaagtgaaatacttgtacttcatcaaaggcttaaacaacctaaatagaggtatggtgctgggcagtttagctgctacagtacgtcttcaggctggaaatgctacagaagtacctgccaattcaactgtgctttccttctgtgcttttgcagtagaccctgctaaagcatataaggattacctagcaagtggaggacaaccaatcaccaactgtgtgaagatgttgtgtacacacactggtacaggacaggcaattactgtaacaccagaagctaacatggaccaagagtcctttggtggtgcttcatgttgtctgtattgtagatgccacattgaccatccaaatcctaaaggattctgtgacttgaaaggtaagtacgtccaaatacctaccacttgtgctaatgacccagtgggttttacacttagaaacacagtctgtaccgtctgcggaatgtggaaaggttatggctgtagttgtgaccaactccgcgaacccttgatgcagtctgcggatgcatcaacgtttttaaacgggtttgcggtgtaagtgcagcccgtcttacaccgtgcggcacaggcactagtactgatgtcgtctacagggcttttgatatttacaacgaaaaagttgctggttttgcaaagttcctaaaaactaattgctgtcgcttccaggagaaggatgaggaaggcaatttattagactcttactttgtagttaagaggcatactatgtctaactaccaacatgaagagactatttataacttggttaaagattgtccagcggttgctgtccatgactttttcaagtttagagtagatggtgacatggtaccacatatatcacgtcagcgtctaactaaatacacaatggctgatttagtctatgctctacgtcattttgatgagggtaattgtgatacattaaaagaaatactcgtcacatacaattgctgtgatgatgattatttcaataagaaggattggtatgacttcgtagagaatcctgacatcttacgcgtatatgctaacttaggtgagcgtgtacgccaatcattattaaagactgtacaattctgcgatgctatgcgtgatgcaggcattgtaggcgtactgacattagataatcaggatcttaatgggaactggtacgatttcggtgatttcgtacaagtagcaccaggctgcggagttcctattgtggattcatattactcattgctgatgcccatcctcactttgactagggcattggctgctgagtcccatatggatgctgatctcgcaaaaccacttattaagtgggatttgctgaaatatgattttacggaagagagactttgtctcttcgaccgttattttaaatattgggaccagacataccatcccaattgtattaactgtttggatgataggtgtatccttcattgtgcaaactttaatgtgttattttctactgtgtttccacctacaagttttggaccactagtaagaaaaatatttgtagatggtgttccttttgttgtttcaactggataccattttcgtgagttaggagtcgtacataatcaggatgtaaacttacatagctcgcgtctcagtttcaaggaacttttagtgtatgctgctgatccagctatgcatgcagcttctggcaatttattgctagataaacgcactacatgcttttcagtagctgcactaacaaacaatgttgcttttcaaactgtcaaacccggtaattttaataaagacttttatgactttgctgtgtctaaaggtttctttaaggaaggaagttctgttgaactaaaacacttcttctttgctcaggatggcaacgctgctatcagtgattatgactattatcgttataatctgccaacaatgtgtgatatcagacaactcctattcgtagttgaagttgttgataaatactttgattgttacgatggtggctgtattaatgccaaccaagtaatcgttaacaatctggataaatcagctggtttcccatttaataaatggggtaaggctagactttattatgactcaatgagttatgaggatcaagatgcacttttcgcgtatactaagcgtaatgtcatccctactataactcaaatgaatcttaagtatgccattagtgcaaagaatagagctcgcaccgtagctggtgtctctatctgtagtactatgacaaatagacagtttcatcagaaattattgaagtcaatagccgccactagaggagctactgtggtaattggaacaagcaagttttacggtggctggcataatatgttaaaaactgtttacagtgatgtagaaactccacaccttatgggttgggattatccaaaatgtgacagagccatgcctaacatgcttaggataatggcctctcttgttcttgctcgcaaacataacacttgctgtaacttatcacaccgtttctacaggttagctaacgagtgtgcgcaagtattaagtgagatggtcatgtgtggcggctcactatatgttaaaccaggtggaacatcatccggtgatgctacaactgcttatgctaatagtgtctttaacatttgtcaagctgttacagccaatgtaaatgcacttctttcaactgatggtaataagatagctgacaagtatgtccgcaatctacaacacaggctctatgagtgtctctatagaaatagggatgttgatcatgaattcgtggatgagttttacgcttacctgcgtaaacatttctccatgatgattctttctgatgatgccgttgtgtgctataacagtaactatgcggctcaaggtttagtagctagcattaagaactttaaggcagttctttattatcaaaataatgtgttcatgtctgaggcaaaatgttggactgagactgaccttactaaaggacctcacgaattttgctcacagcatacaatgctagttaaacaaggagatgattacgtgtacctgccttacccagatccatcaagaatattaggcgcaggctgttttgtcgatgatattgtcaaaacagatggtacacttatgattgaaaggttcgtgtcactggctattgatgcttacccacttacaaaacatcctaatcaggagtatgctgatgtctttcacttgtatttacaatacattagaaagttacatgatgagcttactggccacatgttggacatgtattccgtaatgctaactaatgataacacctcacggtactgggaacctgagttttatgaggctatgtacacaccacatacagtcttgcaggctgtaggtgcttgtgtattgtgcaattcacagacttcacttcgttgcggtgcctgtattaggagaccattcctatgttgcaagtgctgctatgaccatgtcatttcaacatcacacaaattagtgttgtctgttaatccctatgtttgcaatgccccaggttgtgatgtcactgatgtgacacaactgtatctaggaggtatgagctattattgcaagtcacataagcctcccattagttttccattatgtgctaatggtcaggtttttggtttatacaaaaacacatgtgtaggcagtgacaatgtcactgacttcaatgcgatagcaacatgtgattggactaatgctggcgattacatacttgccaacacttgtactgagagactcaagcttttcgcagcagaaacgctcaaagccactgaggaaacatttaagctgtcatatggtattgccactgtacgcgaagtactctctgacagagaattgcatctttcatgggaggttggaaaacctagaccaccattgaacagaaactatgtctttactggttaccgtgtaactaaaaatagtaaagtacagattggagagtacacctttgaaaaaggtgactatggtgatgctgttgtgtacagaggtactacgacatacaagttgaatgttggtgattactttgtgttgacatctcacactgtaatgccacttagtgcacctactctagtgccacaagagcactatgtgagaattactggcttgtacccaacactcaacatctcagatgagttttctagcaatgttgcaaattatcaaaaggtcggcatgcaaaagtactctacactccaaggaccacctggtactggtaagagtcattttgccatcggacttgctctctattacccatctgctcgcatagtgtatacggcatgctctcatgcagctgttgatgccctatgtgaaaaggcattaaaatatttgcccatagataaatgtagtagaatcatacctgcgcgtgcgcgcgtagagtgttttgataaattcaaagtgaattcaacactagaacagtatgttttctgcactgtaaatgcattgccagaaacaactgctgacattgtagtctttgatgaaatctctatggctactaattatgacttgagtgttgtcaatgctagacttcgtgcaaaacactacgtctatattggcgatcctgctcaattaccagccccccgcacattgctgactaaaggcacactagaaccagaatattttaattcagtgtgcagacttatgaaaacaataggtccagacatgttccttggaacttgtcgccgttgtcctgctgaaattgttgacactgtgagtgctttagtttatgacaataagctaaaagcacacaaggataagtcagctcaatgcttcaaaatgttctacaaaggtgttattacacatgatgtttcatctgcaatcaacagacctcaaataggcgttgtaagagaatttcttacacgcaatcctgcttggagaaaagctgtttttatctcaccttataattcacagaacgctgtagcttcaaaaatcttaggattgcctacgcagactgttgattcatcacagggttctgaatatgactatgtcatattcacacaaactactgaaacagcacactcttgtaatgtcaaccgcttcaatgtggctatcacaagggcaaaaattggcattttgtgcataatgtctgatagagatctttatgacaaactgcaatttacaagtctagaaataccacgtcgcaatgtggctacattacaagcagaaaatgtaactggactttttaaggactgtagtaagatcattactggtcttcatcctacacaggcacctacacacctcagcgttgatataaagttcaagactgaaggattatgtgttgacataccaggcataccaaaggacatgacctaccgtagactcatctctatgatgggtttcaaaatgaattaccaagtcaatggttaccctaatatgtttatcacccgcgaagaagctattcgtcacgttcgtgcgtggattggctttgatgtagagggctgtcatgcaactagagatgctgtgggtactaacctacctctccagctaggattttctacaggtgttaacttagtagctgtaccgactggttatgttgacactgaaaataacacagaattcaccagagttaatgcaaaacctccaccaggtgaccagtttaaacatcttataccactcatgtataaaggcttgccctggaatgtagtgcgtattaagatagtacaaatgctcagtgatacactgaaaggattgtcagacagagtcgtgttcgtcctttgggcgcatggctttgagcttacatcaatgaagtactttgtcaagattggacctgaaagaacgtgttgtctgtgtgacaaacgtgcaacttgcttttctacttcatcagatacttatgcctgctggaatcattctgtgggttttgactatgtctataacccatttatgattgatgttcagcagtggggctttacgggtaaccttcagagtaaccatgaccaacattgccaggtacatggaaatgcacatgtggctagttgtgatgctatcatgactagatgtttagcagtccatgagtgctttgttaagcgcgttgattggtctgttgaataccctattataggagatgaactgagggttaattctgcttgcagaaaagtacaacacatggttgtgaagtctgcattgcttgctgataagtttccagttcttcatgacataggaaatccaaaggctatcaagtgtgtgcctcaggctgaagtagaatggaagttctacgatgctcagccatgtagtgacaaagcttacaaaatagaggaactcttctattcttatgctatacatcacgataaattcactgatggtgtttgtttgttttggaattgtaacgttgatcgttacccagccaatgcaattgtgtgtaggtttgacacaagagtcttgtcaaacttgaacttaccaggctgtgatggtggtagtttgtatgtgaataagcatgcattccacactccagctttcgataaaagtgcatttactaatttaaagcaattgcctttcttttactattctgatagtccttgtgagtctcatggcaaacaagtagtgtcggatattgattatgttccactcaaatctgctacgtgtattacacgatgcaatttaggtggtgctgtttgcagacaccatgcaaatgagtaccgacagtacttggatgcatataatatgatgatttctgctggatttagcctatggatttacaaacaatttgatacttataacctgtggaatacatttaccaggttacagagtttagaaaatgtggcttataatgttgttaataaaggacactttgatggacacgccggcgaagcacctgtttccatcattaataatgctgtttacacaaaggtagatggtattgatgtggagatctttgaaaataagacaacacttcctgttaatgttgcatttgagctttgggctaagcgtaacattaaaccagtgccagagattaagatactcaataatttgggtgttgatatcgctgctaatactgtaatctgggactacaaaagagaagccccagcacatgtatctacaataggtgtctgcacaatgactgacattgccaagaaacctactgagagtgcttgttcttcacttactgtcttgtttgatggtagagtggaaggacaggtagacctttttagaaacgcccgtaatggtgttttaataacagaaggttcagtcaaaggtctaacaccttcaaagggaccagcacaagctagcgtcaatggagtcacattaattggagaatcagtaaaaacacagtttaactactttaagaaagtagacggcattattcaacagttgcctgaaacctactttactcagagcagagacttagaggattttaagcccagatcacaaatggaaactgactttctcgagctcgctatggatgaattcatacagcgatataagctcgagggctatgccttcgaacacatcgtttatggagatttcagtcatggacaacttggcggtcttcatttaatgataggcttagccaagcgctcacaagattcaccacttaaattagaggattttatccctatggacagcacagtgaaaaattacttcataacagatgcgcaaacaggttcatcaaaatgtgtgtgttctgtgattgatcttttacttgatgactttgtcgagataataaagtcacaagatttgtcagtgatttcaaaagtggtcaaggttacaattgactatgctgaaatttcattcatgctttggtgtaaggatggacatgttgaaaccttctacccaaaactacaagcaagtcaagcgtggcaaccaggtgttgcgatgcctaacttgtacaagatgcaaagaatgcttcttgaaaagtgtgaccttcagaattatggtgaaaatgctgttataccaaaaggaataatgatgaatgtcgcaaagtatactcaactgtgtcaatacttaaatacacttactttagctgtaccctacaacatgagagttattcactttggtgctggctctgataaaggagttgcaccaggtacagctgtgctcagacaatggttgccaactggcacactacttgtcgattcagatcttaatgacttcgtctccgacgcagattctactttaattggagactgtgcaacagtacatacggctaataaatgggaccttattattagcgatatgtatgaccctaggaccaaacatgtgacaaaagagaatgactctaaagaagggtttttcacttatctgtgtggatttataaagcaaaaactagccctgggtggttctatagctgtaaagataacagagcattcttggaatgctgacctttacaagcttatgggccatttctcatggtggacagcttttgttacaaatgtaaatgcatcatcatcggaagcatttttaattggggctaactatcttggcaagccgaaggaacaaattgatggctataccatgcatgctaactacattttctggaggaacacaaatcctatccagttgtcttcctattcactctttgacatgagcaaatttcctcttaaattaagaggaactgctgtaatgtctcttaaggagaatcaaatcaatgatatgatttattctcttctggaaaaaggtaggcttatcattagagaaaacaacagagttgtggtttcaagtgatattcttgttaacaactaaacgaacatgtttattttcttattatttcttactctcactagtggtagtgaccttgaccggtgcaccacttttgatgatgttcaagctcctaattacactcaacatacttcatctatgaggggggtttactatcctgatgaaatttttagatcagacactctttatttaactcaggatttatttcttccattttattctaatgttacagggtttcatactattaatcatacgtttggcaaccctgtcataccttttaaggatggtatttattttgctgccacagagaaatcaaatgttgtccgtggttgggtttttggttctaccatgaacaacaagtcacagtcggtgattattattaacaattctactaatgttgttatacgagcatgtaactttgaattgtgtgacaaccctttctttgctgtttctaaacccatgggtacacagacacatactatgatattcgataatgcatttaattgcactttcgagtacatatctgatgccttttcgcttgatgtttcagaaaagtcaggtaattttaaacacttacgagagtttgtgtttaaaaataaagatgggtttctctatgtttataagggctatcaacctatagatgtagttcgtgatctaccttctggttttaacactttgaaacctatttttaagttgcctcttggtattaacattacaaattttagagccattcttacagccttttcacctgctcaagacatttggggcacgtcagctgcagcctattttgttggctatttaaagccaactacatttatgctcaagtatgatgaaaatggtacaatcacagatgctgttgattgttctcaaaatccacttgctgaactcaaatgctctgttaagagctttgagattgacaaaggaatttaccagacctctaatttcagggttgttccctcaggagatgttgtgagattccctaatattacaaacttgtgtccttttggagaggtttttaatgctactaaattcccttctgtctatgcatgggagagaaaaaaaatttctaattgtgttgctgattactctgtgctctacaactcaacatttttttcaacctttaagtgctatggcgtttctgccactaagttgaatgatctttgcttctccaatgtctatgcagattcttttgtagtcaagggagatgatgtaagacaaatagcgccaggacaaactggtgttattgctgattataattataaattgccagatgatttcatgggttgtgtccttgcttggaatactaggaacattgatgctacttcaactggtaattataattataaatataggtatcttagacatggcaagcttaggccctttgagagagacatatctaatgtgcctttctcccctgatggcaaaccttgcaccccacctgctcttaattgttattggccattaaatgattatggtttttacaccactactggcattggctaccaaccttacagagttgtagtactttcttttgaacttttaaatgcaccggccacggtttgtggaccaaaattatccactgaccttattaagaaccagtgtgtcaattttaattttaatggactcactggtactggtgtgttaactccttcttcaaagagatttcaaccatttcaacaatttggccgtgatgtttctgatttcactgattccgttcgagatcctaaaacatctgaaatattagacatttcaccttgctcttttgggggtgtaagtgtaattacacctggaacaaatgcttcatctgaagttgctgttctatatcaagatgttaactgcactgatgtttctacagcaattcatgcagatcaactcacaccagcttggcgcatatattctactggaaacaatgtattccagactcaagcaggctgtcttataggagctgagcatgtcgacacttcttatgagtgcgacattcctattggagctggcatttgtgctagttaccatacagtttctttattacgtagtactagccaaaaatctattgtggcttatactatgtctttaggtgctgatagttcaattgcttactctaataacaccattgctatacctactaacttttcaattagcattactacagaagtaatgcctgtttctatggctaaaacctccgtagattgtaatatgtacatctgcggagattctactgaatgtgctaatttgcttctccaatatggtagcttttgcacacaactaaatcgtgcactctcaggtattgctgctgaacaggatcgcaacacacgtgaagtgttcgctcaagtcaaacaaatgtacaaaaccccaactttgaaatattttggtggttttaatttttcacaaatattacctgaccctctaaagccaactaagaggtcttttattgaggacttgctctttaataaggtgacactcgctgatgctggcttcatgaagcaatatggcgaatgcctaggtgatattaatgctagagatctcatttgtgcgcagaagttcaatggacttacagtgttgccacctctgctcactgatgatatgattgctgcctacactgctgctctagttagtggtactgccactgctggatggacatttggtgctggcgctgctcttcaaataccttttgctatgcaaatggcatataggttcaatggcattggagttacccaaaatgttctctatgagaaccaaaaacaaatcgccaaccaatttaacaaggcgattagtcaaattcaagaatcacttacaacaacatcaactgcattgggcaagctgcaagacgttgttaaccagaatgctcaagcattaaacacacttgttaaacaacttagctctaattttggtgcaatttcaagtgtgctaaatgatatcctttcgcgacttgataaagtcgaggcggaggtacaaattgacaggttaattacaggcagacttcaaagccttcaaacctatgtaacacaacaactaatcagggctgctgaaatcagggcttctgctaatcttgctgctactaaaatgtctgagtgtgttcttggacaatcaaaaagagttgacttttgtggaaagggctaccaccttatgtccttcccacaagcagccccgcatggtgttgtcttcctacatgtcacgtatgtgccatcccaggagaggaacttcaccacagcgccagcaatttgtcatgaaggcaaagcatacttccctcgtgaaggtgtttttgtgtttaatggcacttcttggtttattacacagaggaacttcttttctccacaaataattactacagacaatacatttgtctcaggaaattgtgatgtcgttattggcatcattaacaacacagtttatgatcctctgcaacctgagcttgactcattcaaagaagagctggacaagtacttcaaaaatcatacatcaccagatgttgattttggcgacatttcaggcattaacgcttctgtcgtcaacattcaaaaagaaattgaccgcctcaatgaggtcgctaaaaatttaaatgaatcactcattgaccttcaagaattgggaaaatatgagcaatatattaaatggccttggtatgtttggctcggcttcattgctggactaattgccatcgtcatggttacaatcttgctttgttgcatgactagttgttgcagttgcctcaagggtgcatgctcttgtggttcttgctgcaagtttgatgaggatgactctgagccagttctcaagggtgtcaaattacattacacataaacgaacttatggatttgtttatgagattttttactcttggatcaattactgcacagccagtaaaaattgacaatgcttctcctgcaagtactgttcatgctacagcaacgataccgctacaagcctcactccctttcggatggcttgttattggcgttgcatttcttgctgtttttcagagcgctaccaaaataattgcgctcaataaaagatggcagctagccctttataagggcttccagttcatttgcaatttactgctgctatttgttaccatctattcacatcttttgcttgtcgctgcaggtatggaggcgcaatttttgtacctctatgccttgatatattttctacaatgcatcaacgcatgtagaattattatgagatgttggctttgttggaagtgcaaatccaagaacccattactttatgatgccaactactttgtttgctggcacacacataactatgactactgtataccatataacagtgtcacagatacaattgtcgttactgaaggtgacggcatttcaacaccaaaactcaaagaagactaccaaattggtggttattctgaggataggcactcaggtgttaaagactatgtcgttgtacatggctatttcaccgaagtttactaccagcttgagtctacacaaattactacagacactggtattgaaaatgctacattcttcatctttaacaagcttgttaaagacccaccgaatgtgcaaatacacacaatcgacggctcttcaggagttgctaatccagcaatggatccaatttatgatgagccgacgacgactactagcgtgcctttgtaagcacaagaaagtgagtacgaacttatgtactcattcgtttcggaagaaacaggtacgttaatagttaatagcgtacttctttttcttgctttcgtggtattcttgctagtcacactagccatccttactgcgcttcgattgtgtgcgtactgctgcaatattgttaacgtgagtttagtaaaaccaacggtttacgtctactcgcgtgttaaaaatctgaactcttctgaaggagttcctgatcttctggtctaaacgaactaactattattattattctgtttggaactttaacattgcttatcatggcagacaacggtactattaccgttgaggagcttaaacaactcctggaacaatggaacctagtaataggtttcctattcctagcctggattatgttactacaatttgcctattctaatcggaacaggtttttgtacataataaagcttgttttcctctggctcttgtggccagtaacacttgcttgttttgtgcttgctgttgtctacagaattaattgggtgactggcgggattgcgattgcaatggcttgtattgtaggcttgatgtggcttagctacttcgttgcttccttcaggctgtttgctcgtacccgctcaatgtggtcattcaacccagaaacaaacattcttctcaatgtgcctctccgggggacaattgtgaccagaccgctcatggaaagtgaacttgtcattggtgctgtgatcattcgtggtcacttgcgaatggccggacactccctagggcgctgtgacattaaggacctgccaaaagagatcactgtggctacatcacgaacgctttcttattacaaattaggagcgtcgcagcgtgtaggcactgattcaggttttgctgcatacaaccgctaccgtattggaaactataaattaaatacagaccacgccggtagcaacgacaatattgctttgctagtacagtaagtgacaacagatgtttcatcttgttgacttccaggttacaatagcagagatattgattatcattatgaggactttcaggattgctatttggaatcttgacgttataataagttcaatagtgagacaattatttaagcctctaactaagaagaattattcggagttagatgatgaagaacctatggagttagattatccataaaacgaacatgaaaattattctcttcctgacattgattgtatttacatcttgcgagctatatcactatcaggagtgtgttagaggtacgactgtactactaaaagaaccttgcccatcaggaacatacgagggcaattcaccatttcaccctcttgctgacaataaatttgcactaacttgcactagcacacactttgcttttgcttgtgctgacggtactcgacatacctatcagctgcgtgcaagatcagtttcaccaaaacttttcatcagacaagaggaggttcaacaagagctctactcgccactttttctcattgttgctgctctagtatttttaatactttgcttcaccattaagagaaagacagaatgaatgagctcactttaattgacttctatttgtgctttttagcctttctgctattccttgttttaataatgcttattatattttggttttcactcgaaatccaggatctagaagaaccttgtaccaaagtctaaacgaacatgaaacttctcattgttttgacttgtatttctctatgcagttgcatatgcactgtagtacagcgctgtgcatctaataaacctcatgtgcttgaagatccttgtaaggtacaacactaggggtaatacttatagcactgcttggctttgtgctctaggaaaggttttaccttttcatagatggcacactatggttcaaacatgcacacctaatgttactatcaactgtcaagatccagctggtggtgcgcttatagctaggtgttggtaccttcatgaaggtcaccaaactgctgcatttagagacgtacttgttgttttaaataaacgaacaaattaaaatgtctgataatggaccccaatcaaaccaacgtagtgccccccgcattacatttggtggacccacagattcaactgacaataaccagaatggaggacgcaatggggcaaggccaaaacagcgccgaccccaaggtttacccaataatattgcgtcttggttcacagctctcactcagcatggcaaggaggaacttagattccctcgaggccagggcgttccaatcaacaccaatagtggtccagatgaccaaattggctactaccgaagagctacccgacgagttcgtggtggtgacggcaaaatgaaagagctcagccccagatggtacttctattacctaggaactggcccagaagcttcacttccctacggcgctaacaaagaaggcatcgtatgggttgcaactgagggagccttgaatacacccaaagaccacattggcacccgcaatcctaataacaatgctgccaccgtgctacaacttcctcaaggaacaacattgccaaaaggcttctacgcagagggaagcagaggcggcagtcaagcctcttctcgctcctcatcacgtagtcgcggtaattcaagaaattcaactcctggcagcagtaggggaaattctcctgctcgaatggctagcggaggtggtgaaactgccctcgcgctattgctgctagacagattgaaccagcttgagagcaaagtttctggtaaaggccaacaacaacaaggccaaactgtcactaagaaatctgctgctgaggcatctaaaaagcctcgccaaaaacgtactgccacaaaacagtacaacgtcactcaagcatttgggagacgtggtccagaacaaacccaaggaaatttcggggaccaagacctaatcagacaaggaactgattacaaacattggccgcaaattgcacaatttgctccaagtgcctctgcattctttggaatgtcacgcattggcatggaagtcacaccttcgggaacatggctgacttatcatggagccattaaattggatgacaaagatccacaattcaaagacaacgtcatactgctgaacaagcacattgacgcatacaaaacattcccaccaacagagcctaaaaaggacaaaaagaaaaagactgatgaagctcagcctttgccgcagagacaaaagaagcagcccactgtgactcttcttcctgcggctgacatggatgatttctccagacaacttcaaaattccatgagtggagcttctgctgattcaactcaggcataaacactcatgatgaccacacaaggcagatgggctatgtaaacgttttcgcaattccgtttacgatacatagtctactcttgtgcagaatgaattctcgtaactaaacagcacaagtaggtttagttaactttaatctcacatagcaatctttaatcaatgtgtaacattagggaggacttgaaagagccaccacattttcatcgaggccacgcggagtacgatcgagggtacagtgaataatgctagggagagctgcctatatggaagagccctaatgtgtaaaattaattttagtagtgctatccccatgtgattttaatagcttcttaggagaatgac

SEQ ID NO: 29774 - DNA, 29725 bp, SARS Coronavirus
atattaggtttttacctacccaggaaaagccaaccaacctcgatctcttgtagatctgttctctaaacgaactttaaaatctgtgtagctgtcgctcggctgcatgcctagtgcacctacgcagtataaacaataataaattttactgtcgttgacaagaaacgagtaactcgtccctcttctgcagactgcttacggtttcgtccgtgttgcagtcgatcatcagcatacctaggtttcgtccgggtgtgaccgaaaggtaagatggagagccttgttcttggtgtcaacgagaaaacacacgtccaactcagtttgcctgtccttcaggttagagacgtgctagtgcgtggcttcggggactctgtggaagaggccctatcggaggcacgtgaacacctcaaaaatggcacttgtggtctagtagagctggaaaaaggcgtactgccccagcttgaacagccctatgtgttcattaaacgttctgatgccttaagcaccaatcacggccacaaggtcgttgagctggttgcagaaatggacggcattcagtacggtcgtagcggtataacactgggagtactcgtgccacatgtgggcgaaaccccaattgcataccgcaatgttcttcttcgtaagaacggtaataagggagccggtggtcatagctatggcatcgatctaaagtcttatgacttaggtgacgagcttggcactgatcccattgaagattatgaacaaaactggaacactaagcatggcagtggtgcactccgtgaactcactcgtgagctcaatggaggtgcagtcactcgctatgtcgacaacaatttctgtggcccagatgggtaccctcttgattgcatcaaagattttctcgcacgcgcgggcaagtcaatgtgcactctttccgaacaacttgattacatcgagtcgaagagaggtgtctactgctgccgtgaccatgagcatgaaattgcctggttcactgagcgctctgataagagctacgagcaccagacacccttcgaaattaagagtgccaagaaatttgacactttcaaaggggaatgcccaaagtttgtgtttcctcttaactcaaaagtcaaagtcattcaaccacgtgttgaaaagaaaaagactgagggtttcatggggcgtatacgctctgtgtaccctgttgcatctccacaggagtgtaacaatatgcacttgtctaccttgatgaaatgtaatcattgcgatgaagtttcatggcagacgtgcgactttctgaaagccacttgtgaacattgtggcactgaaaatttagttattgaaggacctactacatgtgggtacctacctactaatgctgtagtgaaaatgccatgtcctgcctgtcaagacccagagattggacctgagcatagtgttgcagattatcacaaccactcaaacattgaaactcgactccgcaagggaggtaggactagatgttttggaggctgtgtgtttgcctatgttggctgctataataagcgtgcctactgggttcctcgtgctagtgctgatattggctcaggccatactggcattactggtgacaatgtggagaccttgaatgaggatctccttgagatactgagtcgtgaacgtgttaacattaacattgttggcgattttcatttgaatgaagaggttgccatcattttggcatctttctctgcttctacaagtgcctttattgacactataaagagtcttgattacaagtctttcaaaaccattgttgagtcctgcggtaactataaagttaccaagggaaagcccgtaaaaggtgcttggaacattggacaacagagatcagttttaacaccactgtgtggttttccctcacaggctgctggtgttatcagatcaatttttgcgcgcacacttgatgcagcaaaccactcaattcctgatttgcaaagagcagctgtcaccatacttgatggtatttctgaacagtcattacgtcttgtcgacgccatggtttatacttcagacctgctcaccaacagtgtcattattatggcatatgtaactggtggtcttgtacaacagacttctcagtggttgtctaatcttttgggcactactgttgaaaaactcaggcctatctttgaatggattgaggcgaaacttagtgcaggagttgaatttctcaaggatgcttgggagattctcaaatttctcattacaggtgtttttgacatcgtcaagggtcaaatacaggttgcttcagataacatcaaggattgtgtaaaatgcttcattgatgttgttaacaaggcactcgaaatgtgcattgatcaagtcactatcgctggcgcaaagttgcgatcactcaacttaggtgaagtcttcatcgctcaaagcaagggactttaccgtcagtgtatacgtggcaaggagcagctgcaactactcatgcctcttaaggcaccaaaagaagtaacctttcttgaaggtgattcacatgacacagtacttacctctgaggaggttgttctcaagaacggtgaactcgaagcactcgagacgcccgttgatagcttcacaaatggagctatcgttggcacaccagtctgtgtaaatggcctcatgctcttagagattaaggacaaagaacaatactgcgcattgtctcctggtttactggctacaaacaatgtctttcgcttaaaagggggtgcaccaattaaaggtgtaacctttggagaagatactgtttgggaagttcaaggttacaagaatgtgagaatcacatttgagcttgatgaacgtgttgacaaagtgcttaatgaaaagtgctctgtctacactgttgaatccggtaccgaagttactgagtttgcatgtgttgtagcagaggctgttgtgaagactttacaaccagtttctgatctccttaccaacatgggtattgatcttgatgagtggagtgtagctacattctacttatttgatgatgctggtgaagaaaacttttcatcacgtatgtattgttccttttaccctccagatgaggaagaagaggacgatgcagagtgtgaggaagaagaaattgatgaaacctgtgaacatgagtacggtacagaggatgattatcaaggtctccctctggaatttggtgcctcagctgaaacagttcgagttgaggaagaagaagaggaagactggctggatgatactactgagcaatcagagattgagccagaaccagaacctacacctgaagaaccagttaatcagtttactggttatttaaaacttactgacaatgttgccattaaatgtgttgacatcgttaaggaggcacaaagtgctaatcctatggtgattgtaaatgctgctaacatacacctgaaacatggtggtggtgtagcaggtgcactcaacaaggcaaccaatggtgccatgcaaaaggagagtgatgattacattaagctaaatggccctcttacagtaggagggtcttgtttgctttctggacataatcttgctaagaagtgtctgcatgttgttggacctaacctaaatgcaggtgaggacatccagcttcttaaggcagcatatgaaaatttcaattcacaggacatcttacttgcaccattgttgtcagcaggcatatttggtgctaaaccacttcagtctttacaagtgtgcgtgcagacggttcgtacacaggtttatattgcagtcaatgacaaagctctttatgagcaggttgtcatggattatcttgataacctgaagcctagagtggaagcacctaaacaagaggagccaccaaacacagaagattccaaaactgaggagaaatctgtcgtacagaagcctgtcgatgtgaagccaaaaattaaggcctgcattgatgaggttaccacaacactggaagaaactaagtttcttaccaataagttactcttgtttgctgatatcaatggtaagctttaccatgattctcagaacatgcttagaggtgaagatatgtctttccttgagaaggatgcaccttacatggtaggtgatgttatcactagtggtgatatcacttgtgttgtaataccctccaaaaaggctggtggcactactgagatgctctcaagagctttgaagaaagtgccagttgatgagtatataaccacgtaccctggacaaggatgtgctggttatacacttgaggaagctaagactgctcttaagaaatgcaaatctgcattttatgtactaccttcagaagcacctaatgctaaggaagagattctaggaactgtatcctggaatttgagagaaatgcttgctcatgctgaagagacaagaaaattaatgcctatatgcatggatgttagagccataatggcaaccatccaacgtaagtataaaggaattaaaattcaagagggcatcgttgactatggtgtccgattcttcttttatactagtaaagagcctgtagcttctattattacgaagctgaactctctaaatgagccgcttgtcacaatgccaattggttatgtgacacatggttttaatcttgaagaggctgcgcgctgtatgcgttctcttaaagctcctgccgtagtgtcagtatcatcaccagatgctgttactacatataatggatacctcacttcgtcatcaaagacatctgaggagcactttgtagaaacagtttctttggctggctcttacagagattggtcctattcaggacagcgtacagagttaggtgttgaatttcttaagcgtggtgacaaaattgtgtaccacactctggagagccccgtcgagtttcatcttgacggtgaggttctttcacttgacaaactaaagagtctcttatccctgcgggaggttaagactataaaagtgttcacaactgtggacaacactaatctccacacacagcttgtggatatgtctatgacatatggacagcagtttggtccaacatacttggatggtgctgatgttacaaaaattaaacctcatgtaaatcatgagggtaagactttctttgtactacctagtgatgacacactacgtagtgaagctttcgagtactaccatactcttgatgagagttttcttggtaggtacatgtctgctttaaaccacacaaagaaatggaaatttcctcaagttggtggtttaacttcaattaaatgggctgataacaattgttatttgtctagtgttttattagcacttcaacagcttgaagtcaaattcaatgcaccagcacttcaagaggcttattatagagcccgtgctggtgatgctgctaacttttgtgcactcatactcgcttacagtaataaaactgttggcgagcttggtgatgtcagagaaactatgacccatcttctacagcatgctaatttggaatctgcaaagcgagttcttaatgtggtgtgtaaacattgtggtcagaaaactactaccttaacgggtgtagaagctgtgatgtatatgggtactctatcttatgataatcttaagacaggtgtttccattccatgtgtgtgtggtcgtgatgctacacaatatctagtacaacaagagtcttcttttgttatgatgtctgcaccacctgctgagtataaattacagcaaggtacattcttatgtgcgaatgagtacactggtaactatcagtgtggtcattacactcatataactgctaaggagaccctctatcgtattgacggagctcaccttacaaagatgtcagagtacaaaggaccagtgactgatgttttctacaaggaaacatcttacactacaaccatcaagcctgtgtcgtataaactcgatggagttacttacacagagattgaaccaaaattggatgggtattataaaaaggataatgcttactatacagagcagcctatagaccttgtaccaactcaaccattaccaaatgcgagttttgataatttcaaactcacatgttctaacacaaaatttgctgatgatttaaatcaaatgacaggcttcacaaagccagcttcacgagagctatctgtcacattcttcccagacttgaatggcgatgtagtggctattgactatagacactattcagcgagtttcaagaaaggtgctaaattactgcataagccaattgtttggcacattaaccaggctacaaccaagacaacgttcaaaccaaacacttggtgtttacgttgtctttggagtacaaagccagtagatacttcaaattcatttgaagttctggcagtagaagacacacaaggaatggacaatcttgcttgtgaaagtcaacaacccacctctgaagaagtagtggaaaatcctaccatacagaaggaagtcatagagtgtgacgtgaaaactaccgaagttgtaggcaatgtcatacttaaaccatcagatgaaggtgttaaagtaacacaagagttaggtcatgaggatcttatggctgcttatgtggaaaacacaagcattaccattaagaaacctaatgagctttcactagccttaggtttaaaaacaattgccactcatggtattgctgcaattaatagtgttccttggagtaaaattttggcttatgtcaaaccattcttaggacaagcagcaattacaacatcaaattgcgctaagagattagcacaacgtgtgtttaacaattatatgccttatgtgtttacattattgttccaattgtgtacttttactaaaagtaccaattctagaattagagcttcactacctacaactattgctaaaaatagtgttaagagtgttgctaaattatgtttggatgccggcattaattatgtgaagtcacccaaattttctaaattgttcacaatcgctatgtggctattgttgttaagtatttgcttaggttctctaatctgtgtaactgctgcttttggtgtactcttatctaattttggtgctccttcttattgtaatggcgttagagaattgtatcttaattcgtctaacgttactactatggatttctgtgaaggttcttttccttgcagcatttgtttaagtggattagactcccttgattcttatccagctcttgaaaccattcaggtgacgatttcatcgtacaagctagacttgacaattttaggtctggccgctgagtgggttttggcatatatgttgttcacaaaattcttttatttattaggtctttcagctataatgcaggtgttctttggctattttgctagtcatttcatcagcaattcttggctcatgtggtttatcattagtattgtacaaatggcacccgtttctgcaatggttaggatgtacatcttctttgcttctttctactacatatggaagagctatgttcatatcatggatggttgcacctcttcgacttgcatgatgtgctataagcgcaatcgtgccacacgcgttgagtgtacaactattgttaatggcatgaagagatctttctatgtctatgcaaatggaggccgtggcttctgcaagactcacaattggaattgtctcaattgtgacacattttgcactggtagtacattcattagtgatgaagttgctcgtgatttgtcactccagtttaaaagaccaatcaaccctactgaccagtcatcgtatattgttgatagtgttgctgtgaaaaatggcgcgcttcacctctactttgacaaggctggtcaaaagacctatgagagacatccgctctcccattttgtcaatttagacaatttgagagctaacaacactaaaggttcactgcctattaatgtcatagtttttgatggcaagtccaaatgcgacgagtctgcttctaagtctgcttctgtgtactacagtcagctgatgtgccaacctattctgttgcttgaccaagctcttgtatcagacgttggagatagtactgaagtttccgttaagatgtttgatgcttatgtcgacaccttttcagcaacttttagtgttcctatggaaaaacttaaggcacttgttgctacagctcacagcgagttagcaaagggtgtagctttagatggtgtcctttctacattcgtgtcagctgcccgacaaggtgttgttgataccgatgttgacacaaaggatgttattgaatgtctcaaactttcacatcactctgacttagaagtgacaggtgacagttgtaacaatttcatgctcacctataataaggttgaaaacatgacgcccagagatcttggcgcatgtattgactgtaatgcaaggcatatcaatgcccaagtagcaaaaagtcacaatgtttcactcatctggaatgtaaaagactacatgtctttatctgaacagctgcgtaaacaaattcgtagtgctgccaagaagaacaacataccttttagactaacttgtgctacaactagacaggttgtcaatgtcataactactaaaatctcactcaagggtggtaagattgttagtacttgttttaaacttatgcttaaggccacattattgtgcgttcttgctgcattggtttgttatatcgttatgccagtacatacattgtcaatccatgatggttacacaaatgaaatcattggttacaaagccattcaggatggtgtcactcgtgacatcatttctactgatgattgttttgcaaataaacatgctggttttgacgcatggtttagccagcgtggtggttcatacaaaaatgacaaaagctgccctgtagtagctgctatcattacaagagagattggtttcatagtgcctggcttaccgggtactgtgctgagagcaatcaatggtgacttcttgcattttctacctcgtgtttttagtgctgttggcaacatttgctacacaccttccaaactcattgagtatagtgattttgctacctctgcttgcgttcttgctgctgagtgtacaatttttaaggatgctatgggcaaacctgtgccatattgttatgacactaatttgctagagggttctatttcttatagtgagcttcgtccagacactcgttatgtgcttatggatggttccatcatacagtttcctaacacttacctggagggttctgttagagtagtaacaacttttgatgctgagtactgtagacatggtacatgcgaaaggtcagaagtaggtatttgcctatctaccagtggtagatgggttcttaataatgagcattacagagctctatcaggagttttctgtggtgttgatgcgatgaatctcatagctaacatctttactcctcttgtgcaacctgtgggtgctttagatgtgtctgcttcagtagtggctggtggtattattgccatattggtgacttgtgctgcctactactttatgaaattcagacgtgtttttggtgagtacaaccatgttgttgctgctaatgcacttttgtttttgatgtctttcactatactctgtctggtaccagcttacagctttctgccgggagtctactcagtcttttacttgtacttgacattctatttcaccaatgatgtttcattcttggctcaccttcaatggtttgccatgttttctcctattgtgcctttttggataacagcaatctatgtattctgtatttctctgaagcactgccattggttctttaacaactatcttaggaaaagagtcatgtttaatggagttacatttagtaccttcgaggaggctgctttgtgtacctttttgctcaacaaggaaatgtacctaaaattgcgtagcgagacactgttgccacttacacagtataacaggtatcttgctctatataacaagtacaagtatttcagtggagccttagatactaccagctatcgtgaagcagcttgctgccacttagcaaaggctctaaatgactttagcaactcaggtgctgatgttctctaccaaccaccacagacatcaatcacttctgctgttctgcagagtggttttaggaaaatggcattcccgtcaggcaaagttgaagggtgcatggtacaagtaacctgtggaactacaactcttaatggattgtggttggatgacacagtatactgtccaagacatgtcatttgcacagcagaagacatgcttaatcctaactatgaagatctgctcattcgcaaatccaaccatagctttcttgttcaggctggcaatgttcaacttcgtgttattggccattctatgcaaaattgtctgcttaggcttaaagttgatacttctaaccctaagacacccaagtataaatttgtccgtatccaacctggtcaaacattttcagttctagcatgctacaatggttcaccatctggtgtttatcagtgtgccatgagacctaatcataccattaaaggttctttccttaatggatcatgtggtagtgttggttttaacattgattatgattgcgtgtctttctgctatatgcatcatatggagcttccaacaggagtacacgctggtactgacttagaaggtaaattctatggtccatttgttgacagacaaactgcacaggctgcaggtacagacacaaccataacattaaatgttttggcatggctgtatgctgctgttatcaatggtgataggtggtttcttaatagattcaccactactttgaatgactttaaccttgtggcaatgaagtacaactatgaacctttgacacaagatcatgttgacatattgggacctctttctgctcaaacaggaattgccgtcttagatatgtgtgctgctttgaaagagctgctgcagaatggtatgaatggtcgtactatccttggtagcactattttagaagatgagtttacaccatttgatgttgttagacaatgctctggtgttaccttccaaggtaagttcaagaaaattgttaagggcactcatcattggatgcttttaactttcttgacatcactattgattcttgttcaaagtacacagtggtcactgtttttctttgtttacgagaatgctttcttgccatttactcttggtattatggcaattgctgcatgtgctatgctgcttgttaagcataagcacgcattcttgtgcttgtttctgttaccttctcttgcaacagttgcttactttaatatggtctacatgcctgctagctgggtgatgcgtatcatgacatggcttgaattggctgacactagcttgtctggttataggcttaaggattgtgttatgtatgcttcagctttagttttgcttattctcatgacagctcgcactgtttatgatgatgctgctagacgtgtttggacactgatgaatgtcattacacttgtttacaaagtctactatggtaatgctttagatcaagctatttccatgtgggccttagttatttctgtaacctctaactattctggtgtcgttacgactatcatgtttttagctagagctatagtgtttgtgtgtgttgagtattacccattgttatttattactggcaacaccttacagtgtatcatgcttgtttattgtttcttaggctattgttgctgctgctactttggccttttctgtttactcaaccgttacttcaggcttactcttggtgtttatgactacttggtctctacacaagaatttaggtatatgaactcccaggggcttttgcctcctaagagtagtattgatgctttcaagcttaacattaagttgttgggtattggaggtaaaccatgtatcaaggttgctactgtacagtctaaaatgtctgacgtaaagtgcacatctgtggtactgctctcggttcttcaacaacttagagtagagtcatcttctaaattgtgggcacaatgtgtacaactccacaatgatattcttcttgcaaaagacacaactgaagctttcgagaagatggtttctcttttgtctgttttgctatccatgcagggtgctgtagacattaataggttgtgcgaggaaatgctcgataaccgtgctactcttcaggctattgcttcagaatttagttctttaccatcatatgccgcttatgccactgcccaggaggcctatgagcaggctgtagctaatggtgattctgaagtcgttctcaaaaagttaaagaaatctttgaatgtggctaaatctgagtttgaccgtgatgctgccatgcaacgcaagttggaaaagatggcagatcaggctatgacccaaatgtacaaacaggcaagatctgaggacaagagggcaaaagtaactagtgctatgcaaacaatgctcttcactatgcttaggaagcttgataatgatgcacttaacaacattatcaacaatgcgcgtgatggttgtgttccactcaacatcataccattgactacagcagccaaactcatggttgttgtccctgattatggtacctacaagaacacttgtgatggtaacacctttacatatgcatctgcactctgggaaatccagcaagttgttgatgcggatagcaagattgttcaacttagtgaaattaacatggacaattcaccaaatttggcttggcctcttattgttacagctctaagagccaactcagctgttaaactacagaataatgaactgagtccagtagcactacgacagatgtcctgtgcggctggtaccacacaaacagcttgtactgatgacaatgcacttgcctactataacaattcgaagggaggtaggtttgtgctggcattactatcagaccaccaagatctcaaatgggctagattccctaagagtgatggtacaggtacaatttacacagaactggaaccaccttgtaggtttgttacagacacaccaaaagggcctaaagtgaaatacttgtacttcatcaaaggcttaaacaacctaaatagaggtatggtgctgggcagtttagctgctacagtacgtcttcaggctggaaatgctacagaagtacctgccaattcaactgtgctttccttctgtgcttttgcagtagaccctgctaaagcatataaggattacctagcaagtggaggacaaccaatcaccaactgtgtgaagatgttgtgtacacacactggtacaggacaggcaattactgtaacaccagaagctaacatggaccaagagtcctttggtggtgcttcatgttgtctgtattgtagatgccacattgaccatccaaatcctaaaggattctgtgacttgaaaggtaagtacgtccaaatacctaccacttgtgctaatgacccagtgggttttacacttagaaacacagtctgtaccgtctgcggaatgtggaaaggttatggctgtagttgtgaccaactccgcgaacccttgatgcagtctgcggatgcatcaacgtttttaaacgggtttgcggtgtaagtgcagcccgtcttacaccgtgcggcacaggcactagtactgatgtcgtctacagggcttttgatatttacaacgaaaaagttgctggttttgcaaagttcctaaaaactaattgctgtcgcttccaggagaaggatgaggaaggcaatttattagactcttactttgtagttaagaggcatactatgtctaactaccaacatgaagagactatttataacttggttaaagattgtccagcggttgctgtccatgactttttcaagtttagagtagatggtgacatggtaccacatatatcacgtcagcgtctaactaaatacacaatggctgatttagtctatgctctacgtcattttgatgagggtaattgtgatacattaaaagaaatactcgtcacatacaattgctgtgatgatgattatttcaataagaaggattggtatgacttcgtagagaatcctgacatcttacgcgtatatgctaacttaggtgagcgtgtacgccaatcattattaaagactgtacaattctgcgatgctatgcgtgatgcaggcattgtaggcgtactgacattagataatcaggatcttaatgggaactggtacgatttcggtgatttcgtacaagtagcaccaggctgcggagttcctattgtggattcatattactcattgctgatgcccatcctcactttgactagggcattggctgctgagtcccatatggatgctgatctcgcaaaaccacttattaagtgggatttgctgaaatatgattttacggaagagagactttgtctcttcgaccgttattttaaatattgggaccagacataccatcccaattgtattaactgtttggatgataggtgtatccttcattgtgcaaactttaatgtgttattttctactgtgtttccacctacaagttttggaccactagtaagaaaaatatttgtagatggtgttccttttgttgtttcaactggataccattttcgtgagttaggagtcgtacataatcaggatgtaaacttacatagctcgcgtctcagtttcaaggaacttttagtgtatgctgctgatccagctatgcatgcagcttctggcaatttattgctagataaacgcactacatgcttttcagtagctgcactaacaaacaatgttgcttttcaaactgtcaaacccggtaattttaataaagacttttatgactttgctgtgtctaaaggtttctttaaggaaggaagttctgttgaactaaaacacttcttctttgctcaggatggcaacgctgctatcagtgattatgactattatcgttataatctgccaacaatgtgtgatatcagacaactcctattcgtagttgaagttgttgataaatactttgattgttacgatggtggctgtattaatgccaaccaagtaatcgttaacaatctggataaatcagctggtttcccatttaataaatggggtaaggctagactttattatgactcaatgagttatgaggatcaagatgcacttttcgcgtatactaagcgtaatgtcatccctactataactcaaatgaatcttaagtatgccattagtgcaaagaatagagctcgcaccgtagctggtgtctctatctgtagtactatgacaaatagacagtttcatcagaaattattgaagtcaatagccgccactagaggagctactgtggtaattggaacaagcaagttttacggtggctggcataatatgttaaaaactgtttacagtgatgtagaaactccacaccttatgggttgggattatccaaaatgtgacagagccatgcctaacatgcttaggataatggcctctcttgttcttgctcgcaaacataacacttgctgtaacttatcacaccgtttctacaggttagctaacgagtgtgcgcaagtattaagtgagatggtcatgtgtggcggctcactatatgttaaaccaggtggaacatcatccggtgatgctacaactgcttatgctaatagtgtctttaacatttgtcaagctgttacagccaatgtaaatgcacttctttcaactgatggtaataagatagctgacaagtatgtccgcaatctacaacacaggctctatgagtgtctctatagaaatagggatgttgatcatgaattcgtggatgagttttacgcttacctgcgtaaacatttctccatgatgattctttctgatgatgccgttgtgtgctataacagtaactatgcggctcaaggtttagtagctagcattaagaactttaaggcagttctttattatcaaaataatgtgttcatgtctgaggcaaaatgttggactgagactgaccttactaaaggacctcacgaattttgctcacagcatacaatgctagttaaacaaggagatgattacgtgtacctgccttacccagatccatcaagaatattaggcgcaggctgttttgtcgatgatattgtcaaaacagatggtacacttatgattgaaaggttcgtgtcactggctattgatgcttacccacttacaaaacatcctaatcaggagtatgctgatgtctttcacttgtatttacaatacattagaaagttacatgatgagcttactggccacatgttggacatgtattccgtaatgctaactaatgataacacctcacggtactgggaacctgagttttatgaggctatgtacacaccacatacagtcttgcaggctgtaggtgcttgtgtattgtgcaattcacagacttcacttcgttgcggtgcctgtattaggagaccattcctatgttgcaagtgctgctatgaccatgtcatttcaacatcacacaaattagtgttgtctgttaatccctatgtttgcaatgccccgggttgtgatgtcactgatgtgacacaactgtatctaggaggtatgagctattattgcaagtcacataagcctcccattagttttccattatgtgctaatggtcaggtttttggtttatacaaaaacacatgtgtaggcagtgacaatgtcactgacttcaatgcgatagcaacatgtgattggactaatgctggcgattacatacttgccaacacttgtactgagagactcaagcttttcgcagcagaaacgctcaaagccactgaggaaacatttaagctgtcatatggtattgccactgtacgcgaagtactctctgacagagaattgcatctttcatgggaggttggaaaacctagaccaccattgaacagaaactatgtctttactggttaccgtgtaactaaaaatagtaaagtacagattggagagtacacctttgaaaaaggtgactatggtgatgctgttgtgtacagaggtactacgacatacaagttgaatgttggtgattactttgtgttgacatctcacactgtaatgccacttagtgcacctactctagtgccacaagagcactatgtgagaattactggcttgtacccaacactcaacatctcagatgagttttctagcaatgttgcaaattatcaaaaggtcggcatgcaaaagtactctacactccaaggaccacctggtactggtaagagtcattttgccatcggacttgctctctattacccatctgctcgcatagtgtatacggcatgctctcatgcagctgttgatgccctatgtgaaaaggcattaaaatatttgcccatagataaatgtagtagaatcatacctgcgcgtgcgcgcgtagagtgttttgataaattcaaagtgaattcaacactagaacagtatgttttctgcactgtaaatgcattgccagaaacaactgctgacattgtagtctttgatgaaatctctatggctactaattatgacttgagtgttgtcaatgctagacttcgtgcaaaacactacgtctatattggcgatcctgctcaattaccagccccccgcacattgctgactaaaggcacactagaaccagaatattttaattcagtgtgcagacttatgaaaacaataggtccagacatgttccttggaacttgtcgccgttgtcctgctgaaattgttgacactgtgagtgctttagtttatgacaataagctaaaagcacacaaggataagtcagctcaatgcttcaaaatgttctacaaaggtgttattacacatgatgtttcatctgcaatcaacagacctcaaataggcgttgtaagagaatttcttacacgcaatcctgcttggagaaaagctgtttttatctcaccttataattcacagaacgctgtagcttcaaaaatcttaggattgcctacgcagactgttgattcatcacagggttctgaatatgactatgtcatattcacacaaactactgaaacagcacactcttgtaatgtcaaccgcttcaatgtggctatcacaagggcaaaaattggcattttgtgcataatgtctgatagagatctttatgacaaactgcaatttacaagtctagaaataccacgtcgcaatgtggctacattacaagcagaaaatgtaactggactttttaaggactgtagtaagatcattactggtcttcatcctacacaggcacctacacacctcagcgttgatataaagttcaagactgaaggattatgtgttgacataccaggcataccaaaggacatgacctaccgtagactcatctctatgatgggtttcaaaatgaattaccaagtcaatggttaccctaatatgtttatcacccgcgaagaagctattcgtcacgttcgtgcgtggattggctttgatgtagagggctgtcatgcaactagagatgctgtgggtactaacctacctctccagctaggattttctacaggtgttaacttagtagctgtaccgactggttatgttgacactgaaaataacacagaattcaccagagttaatgcaaaacctccaccaggtgaccagtttaaacatcttataccactcatgtataaaggcttgccctggaatgtagtgcgtattaagatagtacaaatgctcagtgatacactgaaaggattgtcagacagagtcgtgttcgtcctttgggcgcatggctttgagcttacatcaatgaagtactttgtcaagattggacctgaaagaacgtgttgtctgtgtgacaaacgtgcaacttgcttttctacttcatcagatacttatgcctgctggaatcattctgtgggttttgactatgtctataacccatttatgattgatgttcagcagtggggctttacgggtaaccttcagagtaaccatgaccaacattgccaggtacatggaaatgcacatgtggctagttgtgatgctatcatgactagatgtttagcagtccatgagtgctttgttaagcgcgttgattggtctgttgaataccctattataggagatgaactgagggttaattctgcttgcagaaaagtacaacacatggttgtgaagtctgcattgcttgctgataagtttccagttcttcatgacattggaaatccaaaggctatcaagtgtgtgcctcaggctgaagtagaatggaagttctacgatgctcagccatgtagtgacaaagcttacaaaatagaggaactcttctattcttatgctacacatcacgataaattcactgatggtgtttgtttgttttggaattgtaacgttgatcgttacccagccaatgcaattgtgtgtaggtttgacacaagagtcttgtcaaacttgaacttaccaggctgtgatggtggtagtttgtatgtgaataagcatgcattccacactccagctttcgataaaagtgcatttactaatttaaagcaattgcctttcttttactattctgatagtccttgtgagtctcatggcaaacaagtagtgtcggatattgattatgttccactcaaatctgctacgtgtattacacgatgcaatttaggtggtgctgtttgcagacaccatgcaaatgagtaccgacagtacttggatgcatataatatgatgatttctgctggatttagcctatggatttacaaacaatttgatacttataacctgtggaatacatttaccaggttacagagtttagaaaatgtggcttataatgttgttaataaaggacactttgatggacacgccggcgaagcacctgtttccatcattaataatgctgtttacacaaaggtagatggtattgatgtggagatctttgaaaataagacaacacttcctgttaatgttgcatttgagctttgggctaagcgtaacattaaaccagtgccagagattaagatactcaataatttgggtgttgatatcgctgctaatactgtaatctgggactacaaaagagaagccccagcacatgtatctacaataggtgtctgcacaatgactgacattgccaagaaacctactgagagtgcttgttcttcacttactgtcttgtttgatggtagagtggaaggacaggtagacctttttagaaacgcccgtaatggtgttttaataacagaaggttcagtcaaaggtctaacaccttcaaagggaccagcacaagctagcgtcaatggagtcacattaattggagaatcagtaaaaacacagtttaactactttaagaaagtagacggcattattcaacagttgcctgaaacctactttactcagagcagagacttagaggattttaagcccagatcacaaatggaaactgactttctcgagctcgctatggatgaattcatacagcgatataagctcgagggctatgccttcgaacacatcgtttatggagatttcagtcatggacaacttggcggtcttcatttaatgataggcttagccaagcgctcacaagattcaccacttaaattagaggattttatccctatggacagcacagtgaaaaattacttcataacagatgcgcaaacaggttcatcaaaatgtgtgtgttctgtgattgatcttttacttgatgactttgtcgagataataaagtcacaagatttgtcagtgatttcaaaagtggtcaaggttacaattgactatgctgaaatttcattcatgctttggtgtaaggatggacatgttgaaaccttctacccaaaactacaagcaagtcaagcgtggcaaccaggtgttgcgatgcctaacttgtacaagatgcaaagaatgcttcttgaaaagtgtgaccttcagaattatggtgaaaatgctgttataccaaaaggaataatgatgaatgtcgcaaagtatactcaactgtgtcaatacttaaatacacttactttagctgtaccctacaacatgagagttattcactttggtgctggctctgataaaggagttgcaccaggtacagctgtgctcagacaatggttgccaactggcacactacttgtcgattcagatcttaatgacttcgtctccgacgcagattctactttaattggagactgtgcaacagtacatacggctaataaatgggaccttattattagcgatatgtatgaccctaggaccaaacatgtgacaaaagagaatgactctaaagaagggtttttcacttatctgtgtggatttataaagcaaaaactagccctgggtggttctatagctgtaaagataacagagcattcttggaatgctgacctttacaagcttatgggccatttctcatggtggacagcttttgttacaaatgtaaatgcatcatcatcggaagcatttttaattggggctaactatcttggcaagccgaaggaacaaattgatggctataccatgcatgctaactacattttctggaggaacacaaatcctatccagttgtcttcctattcactctttgacatgagcaaatttcctcttaaattaagaggaactgctgtaatgtctcttaaggagaatcaaatcaatgatatgatttattctcttctggaaaaaggtaggcttatcattagagaaaacaacagagttgtggtttcaagtgatattcttgttaacaactaaacgaacatgtttattttcttattatttcttactctcactagtggtagtgaccttgaccggtgcaccacttttgatgatgttcaagctcctaattacactcaacatacttcatctatgaggggggtttactatcctgatgaaatttttagatcagacactctttatttaactcaggatttatttcttccattttattctaatgttacagggtttcatactattaatcatacgtttggcaaccctgtcataccttttaaggatggtatttattttgctgccacagagaaatcaaatgttgtccgtggttgggtttttggttctaccatgaacaacaagtcacagtcggtgattattattaacaattctactaatgttgttatacgagcatgtaactttgaattgtgtgacaaccctttctttgctgtttctaaacccatgggtacacagacacatactatgatattcgataatgcatttaattgcactttcgagtacatatctgatgccttttcgcttgatgtttcagaaaagtcaggtaattttaaacacttacgagagtttgtgtttaaaaataaagatgggtttctctatgtttataagggctatcaacctatagatgtagttcgtgatctaccttctggttttaacactttgaaacctatttttaagttgcctcttggtattaacattacaaattttagagccattcttacagccttttcacctgctcaagacatttggggcacgtcagctgcagcctattttgttggctatttaaagccaactacatttatgctcaagtatgatgaaaatggtacaatcacagatgctgttgattgttctcaaaatccacttgctgaactcaaatgctctgttaagagctttgagattgacaaaggaatttaccagacctctaatttcagggttgttccctcaggagatgttgtgagattccctaatattacaaacttgtgtccttttggagaggtttttaatgctactaaattcccttctgtctatgcatgggagagaaaaaaaatttctaattgtgttgctgattactctgtgctctacaactcaacatttttttcaacctttaagtgctatggcgtttctgccactaagttgaatgatctttgcttctccaatgtctatgcagattcttttgtagtcaagggagatgatgtaagacaaatagcgccaggacaaactggtgttattgctgattataattataaattgccagatgatttcatgggttgtgtccttgcttggaatactaggaacattgatgctacttcaactggtaattataattataaatataggtatcttagacatggcaagcttaggccctttgagagagacatatctaatgtgcctttctcccctgatggcaaaccttgcaccccacctgctcttaattgttattggccattaaatgattatggtttttacaccactactggcattggctaccaaccttacagagttgtagtactttcttttgaacttttaaatgcaccggccacggtttgtggaccaaaattatccactgaccttattaagaaccagtgtgtcaattttaattttaatggactcactggtactggtgtgttaactccttcttcaaagagatttcaaccatttcaacaatttggccgtgatgtttctgatttcactgattccgttcgagatcctaaaacatctgaaatattagacatttcaccttgctcttttgggggtgtaagtgtaattacacctggaacaaatgcttcatctgaagttgctgttctatatcaagatgttaactgcactgatgtttctacagcaattcatgcagatcaactcacaccagcttggcgcatatattctactggaaacaatgtattccagactcaagcaggctgtcttataggagctgagcatgtcgacacttcttatgagtgcgacattcctattggagctggcatttgtgctagttaccatacagtttctttattacgtagtactagccaaaaatctattgtggcttatactatgtctttaggtgctgatagttcaattgcttactctaataacaccattgctatacctactaacttttcaattagcattactacagaagtaatgcctgtttctatggctaaaacctccgtagattgtaatatgtacatctgcggagattctactgaatgtgctaatttgcttctccaatatggtagcttttgcacacaactaaatcgtgcactctcaggtattgctgctgaacaggatcgcaacacacgtgaagtgttcgctcaagtcaaacaaatgtacaaaaccccaactttgaaatattttggtggttttaatttttcacaaatattacctgaccctctaaagccaactaagaggtcttttattgaggacttgctctttaataaggtgacactcgctgatgctggcttcatgaagcaatatggcgaatgcctaggtgatattaatgctagagatctcatttgtgcgcagaagttcaatggacttacagtgttgccacctctgctcactgatgatatgattgctgcctacactgctgctctagttagtggtactgccactgctggatggacatttggtgctggcgctgctcttcaaataccttttgctatgcaaatggcatataggttcaatggcattggagttacccaaaatgttctctatgagaaccaaaaacaaatcgccaaccaatttaacaaggcgattagtcaaattcaagaatcacttacaacaacatcaactgcattgggcaagctgcaagacgttgttaaccagaatgctcaagcattaaacacacttgttaaacaacttagctctaattttggtgcaatttcaagtgtgctaaatgatatcctttcgcgacttgataaagtcgaggcggaggtacaaattgacaggttaattacaggcagacttcaaagccttcaaacctatgtaacacaacaactaatcagggctgctgaaatcagggcttctgctaatcttgctgctactaaaatgtctgagtgtgttcttggacaatcaaaaagagttgacttttgtggaaagggctaccaccttatgtccttcccacaagcagccccgcatggtgttgtcttcctacatgtcacgtatgtgccatcccaggagaggaacttcaccacagcgccagcaatttgtcatgaaggcaaagcatacttccctcgtgaaggtgtttttgtgtttaatggcacttcttggtttattacacagaggaacttcttttctccacaaataattactacagacaatacatttgtctcaggaaattgtgatgtcgttattggcatcattaacaacacagtttatgatcctctgcaacctgagcttgactcattcaaagaagagctggacaagtacttcaaaaatcatacatcaccagatgttgatcttggcgacatttcaggcattaacgcttctgtcgtcaacattcaaaaagaaattgaccgcctcaatgaggtcgctaaaaatttaaatgaatcactcattgaccttcaagaattgggaaaatatgagcaatatattaaatggccttggtatgtttggctcggcttcattgctggactaattgccatcgtcatggttacaatcttgctttgttgcatgactagttgttgcagttgcctcaagggtgcatgctcttgtggttcttgctgcaagtttgatgaggatgactctgagccagttctcaagggtgtcaaattacattacacataaacgaacttatggatttgtttatgagattttttactcttggatcaattactgcacagccagtaaaaattgacaatgcttctcctgcaagtactgttcatgctacagcaacgataccgctacaagcctcactccctttcggatggcttgttattggcgttgcatttcttgctgtttttcagagcgctaccaaaataattgcgctcaataaaagatggcagctagccctttataagggcttccagttcatttgcaatttactgctgctatttgttaccatctattcacatcttttgcttgtcgctgcaggtatggaggcgcaatttttgtacctctatgccttgatatattttctacaatgcatcaacgcatgtagaattattatgagatgttggctttgttggaagtgcaaatccaagaacccattactttatgatgccaactactttgtttgctggcacacacataactatgactactgtataccatataacagtgtcacagatacaattgtcgttactgaaggtgacggcatttcaacaccaaaactcaaagaagactaccaaattggtggttattctgaggataggcactcaggtgttaaagactatgtcgttgtacatggctatttcaccgaagtttactaccagcttgagtctacacaaattactacagacactggtattgaaaatgctacattcttcatctttaacaagcttgttaaagacccaccgaatgtgcaaatacacacaatcgacggctcttcaggagttgctaatccagcaatggatccaatttatgatgagccgacgacgactactagcgtgcctttgtaagcacaagaaagtgagtacgaacttatgtactcattcgtttcggaagaaacaggtacgttaatagttaatagcgtacttctttttcttgctttcgtggtattcttgctagtcacactagccatccttactgcgcttcgattgtgtgcgtactgctgcaatattgttaacgtgagtttagtaaaaccaacggtttacgtctactcgcgtgttaaaaatctgaactcttctgaaggagttcctgatcttctggtctaaacgaactaactattattattattctgtttggaactttaacattgcttatcatggcagacaacggtactattaccgttgaggagcttaaacaactcctggaacaatggaacctagtaataggtttcctattcctagcctggattatgttactacaatttgcctattctaatcggaacaggtttttgtacataataaagcttgttttcctctggctcttgtggccagtaacacttgcttgttttgtgcttgctgttgtctacagaattaattgggtgactggcgggattgcgattgcaatggcttgtattgtaggcttgatgtggcttagctacttcgttgcttccttcaggctgtttgctcgtacccgctcaatgtggtcattcaacccagaaacaaacattcttctcaatgtgcctctccgggggacaattgtgaccagaccgctcatggaaagtgaacttgtcattggtgctgtgatcattcgtggtcacttgcgaatggccggacactccctagggcgctgtgacattaaggacctgccaaaagagatcactgtggctacatcacgaacgctttcttattacaaattaggagcgtcgcagcgtgtaggcactgattcaggttttgctgcatacaaccgctaccgtattggaaactataaattaaatacagaccacgccggtagcaacgacaatattgctttgctagtacagtaagtgacaacagatgtttcatcttgttgacttccaggttacaatagcagagatattgattatcattatgaggactttcaggattgctatttggaatcttgacgttataataagttcaatagtgagacaattatttaagcctctaactaagaagaattattcggagttagatgatgaagaacctatggagttagattatccataaaacgaacatgaaaattattctcttcctgacattgattgtatttacatcttgcgagctatatcactatcaggagtgtgttagaggtacgactgtactactaaaagaaccttgcccatcaggaacatacgagggcaattcaccatttcaccctcttgctgacaataaatttgcactaacttgcactagcacacactttgcttttgcttgtgctgacggtactcgacatacctatcagctgcgtgcaagatcagtttcaccaaaacttttcatcagacaagaggaggttcaacaagagctctactcgccactttttctcattgttgctgctctagtatttttaatactttgcttcaccattaagagaaagacagaatgaatgagctcactttaattgacttctatttgtgctttttagcctttctgctattccttgttttaataatgcttattatattttggttttcactcgaaatccaggatctagaagaaccttgtaccaaagtctaaacgaacatgaaacttctcattgttttgacttgtatctctatgcagttgcatatgcactgtagtacagcgctgtgcatctaataaacctcatgtgcttgaagatccttgtaaggtacaacactaggggtaatacttatagcactgcttggctttgtgctctaggaaaggttttaccttttcatagatggcacactatggttcaaacatgcacacctaatgttactatcaactgtcaagatccagctggtggtgcgcttatagctaggtgttggtaccttcatgaaggtcaccaaactgctgcatttagagacgtacttgttgttttaaataaacgaacaaattaaaatgtctgataatggaccccaatcaaaccaacgtagtgccccccgcattacatttggtggacccacagattcaactgacaataaccagaatggaggacgcaatggggcaaggccaaaacagcgccgaccccaaggtttacccaataatactgcgtcttggttcacagctctcactcagcatggcaaggaggaacttagattccctcgaggccagggcgttccaatcaacaccaatagtggtccagatgaccaaattggctactaccgaagagctacccgacgagttcgtggtggtgacggcaaaatgaaagagctcagccccagatggtacttctattacctaggaactggcccagaagcttcacttccctacggcgctaacaaagaaggcatcgtatgggttgcaactgagggagccttgaatacacccaaagaccacattggcacccgcaatcctaataacaatgctgccaccgtgctacaacttcctcaaggaacaacattgccaaaaggcttctacgcagagggaagcagaggcggcagtcaagcctcttctcgctcctcatcacgtagtcgcggtaattcaagaaattcaactcctggcagcagtaggggaaattctcctgctcgaatggctagcggaggtggtgaaactgccctcgcgctattgctgctagacagattgaaccagcttgagagcaaagtttctggtaaaggccaacaacaacaaggccaaactgtcactaagaaatctgctgctgaggcatctaaaaagcctcgccaaaaacgtactgccacaaaacagtacaacgtcactcaagcatttgggagacgtggtccagaacaaacccaaggaaatttcggggaccaagacctaatcagacaaggaactgattacaaacattggccgcaaattgcacaatttgctccaagtgcctctgcattctttggaatgtcacgcattggcatggaagtcacaccttcgggaacatggctgacttatcatggagccattaaattggatgacaaagatccacaattcaaagacaacgtcatactgctgaacaagcacattgacgcatacaaaacattcccaccaacagagcctaaaaaggacaaaaagaaaaagactgatgaagctcagcctttgccgcagagacaaaagaagcagcccactgtgactcttcttcctgcggctgacatggatgatttctccagacaacttcaaaattccatgagtggagcttctgctgattcaactcaggcataaacactcatgatgaccacacaaggcagatgggctatgtaaacgttttcgcaattccgtttacgatacatagtctactcttgtgcagaatgaattctcgtaactaaacagcacaagtaggtttagttaactttaatctcacatagcaatctttaatcaatgtgtaacattagggaggacttgaaagagccaccacattttcatcgaggccacgcggagtacgatcgagggtacagtgaataatgctagggagagctgcctatatggaagagccctaatgtgtaaaattaattttagtagtgctatccccatgtgattttaatagcttcttaggagaatgac

SEQ ID NO: 29775 - DNA, 666 bp, SARS Coronavirus
atggcagacaacggtactattaccgttgaggagcttaaacaactcctggaacaatggaacctagtaataggtttcctattcctagcctggattatgttactacaatttgcctattctaatcggaacaggtttttgtacataataaagcttgttttcctctggctcttgtggccagtaacacttgcttgttttgtgcttgctgctgtctacagaattaattgggtgactggcgggattgcgattgcaatggcttgtattgtaggcttgatgtggcttagctacttcgttgcttccttcaggctgtttgctcgtacccgctcaatgtggtcattcaacccagaaacaaacattcttctcaatgtgcctctccgggggacaattgtgaccagaccgctcatggaaagtgaacttgtcattggtgctgtgatcattcgtggtcacttgcgaatggccggacactccctagggcgctgtgacattaaggacctgccaaaagagatcactgtggctacatcacgaacgctttcttattacaaattaggagcgtcgcagcgtgtaggcactgattcaggttttgctgcatacaaccgctaccgtattggaaactataaattaaatacagaccacgccggtagcaacgacaatattgctttgctagtacagtaa

SEQ ID NO: 29776 - DNA, 231 bp, SARS Coronavirus
atgtactcattcgtttcggaagaaacaggtacgttaatagttaatagcgtacttctttttcttgctttcgtggtattcttgctagtcacactagccatccttactgcgcttcgattgtgtgcgtactgctgcaatattgttaacgtgagtttagtaaaaccaacggtttacgtctactcgcgtgttaaaaatctgaactcttctgaaggagttcctgatcttctggtctaa

SEQ ID NO: 29777 - DNA, 3768 bp, SARS Coronavirus
atgtttattttcttattatttcttactctcactagtggtagtgaccttgaccggtgcaccacttttgatgatgttcaagctcctaattacactcaacatacttcatctatgaggggggtttactatcctgatgaaatttttagatcagacactctttatttaactcaggatttatttcttccattttattctaatgttacagggtttcatactattaatcatacgtttggcaaccctgtcataccttttaaggatggtatttattttgctgccacagagaaatcaaatgttgtccgtggttgggtttttggttctaccatgaacaacaagtcacagtcggtgattattattaacaattctactaatgttgttatacgagcatgtaactttgaattgtgtgacaaccctttctttgctgtttctaaacccatgggtacacagacacatactatgatattcgataatgcatttaattgcactttcgagtacatatctgatgccttttcgcttgatgtttcagaaaagtcaggtaattttaaacacttacgagagtttgtgtttaaaaataaagatgggtttctctatgtttataagggctatcaacctatagatgtagttcgtgatctaccttctggttttaacactttgaaacctatttttaagttgcctcttggtattaacattacaaattttagagccattcttacagccttttcacctgctcaagacatttggggcacgtcagctgcagcctattttgttggctatttaaagccaactacatttatgctcaagtatgatgaaaatggtacaatcacagatgctgttgattgttctcaaaatccacttgctgaactcaaatgctctgttaagagctttgagattgacaaaggaatttaccagacctctaatttcagggttgttccctcaggagatgttgtgagattccctaatattacaaacttgtgtccttttggagaggtttttaatgctactaaattcccttctgtctatgcatgggagagaaaaaaaatttctaattgtgttgctgattactctgtgctctacaactcaacatttttttcaacctttaagtgttatggcgtttctgccactaagttgaatgatctttgcttctccaatgtctatgcagattcttttgtagtcaagggagatgatgtaagacaaatagcgccaggacaaactggtgttattgctgattataattataaattgccagatgatttcatgggttgtgtccttgcttggaatactaggaacattgatgctacttcaactggtaattataattataaatataggtatcttagacatggcaagcttaggccctttgagagagacatatctaatgtgcctttctcccctgatggcaaaccttgcaccccacctgctcttaattgttattggccattaaatgattatggtttttacaccactactggcattggctaccaaccttacagagttgtagtactttcttttgaacttttaaatgcaccggccacggtttgtggaccaaaattatccactgaccttattaagaaccagtgtgtcaattttaattttaatggactcactggtactggtgtgttaactccttcttcaaagagatttcaaccatttcaacaatttggccgtgatgtttctgatttcactgattccgttcgagatcctaaaacatctgaaatattagacatttcaccttgctcttttgggggtgtaagtgtaattacacctggaacaaatgcttcatctgaagttgctgttctatatcaagatgttaactgcactgatgtttctacagcaattcatgcagatcaactcacaccagcttggcgcatatattctactggaaacaatgtattccagactcaagcaggctgtcttataggagctgagcatgtcgacacttcttatgagtgcgacattcctattggagctggcatttgtgctagttaccatacagtttctttattacgtagtactagccaaaaatctattgtggcttatactatgtctttaggtgctgatagttcaattgcttactctaataacaccattgctatacctactaacttttcaattagcattactacagaagtaatgcctgtttctatggctaaaacctccgtagattgtaatatgtacatctgcggagattctactgaatgtgctaatttgcttctccaatatggtagcttttgcacacaactaaatcgtgcactctcaggtattgctgctgaacaggatcgcaacacacgtgaagtgttcgctcaagtcaaacaaatgtacaaaaccccaactttgaaatattttggtggttttaatttttcacaaatattacctgaccctctaaagccaactaagaggtcttttattgaggacttgctctttaataaggtgacactcgctgatgctggcttcatgaagcaatatggcgaatgcctaggtgatattaatgctagagatctcatttgtgcgcagaagttcaatggacttacagtgttgccacctctgctcactgatgatatgattgctgcctacactgctgctctagttagtggtactgccactgctggatggacatttggtgctggcgctgctcttcaaataccttttgctatgcaaatggcatataggttcaatggcattggagttacccaaaatgttctctatgagaaccaaaaacaaatcgccaaccaatttaacaaggcgattagtcaaattcaagaatcacttacaacaacatcaactgcattgggcaagctgcaagacgttgttaaccagaatgctcaagcattaaacacacttgttaaacaacttagctctaattttggtgcaatttcaagtgtgctaaatgatatcctttcgcgacttgataaagtcgaggcggaggtacaaattgacaggttaattacaggcagacttcaaagccttcaaacctatgtaacacaacaactaatcagggctgctgaaatcagggcttctgctaatcttgctgctactaaaatgtctgagtgtgttcttggacaatcaaaaagagttgacttttgtggaaagggctaccaccttatgtccttcccacaagcagccccgcatggtgttgtcttcctacatgtcacgtatgtgccatcccaggagaggaacttcaccacagcgccagcaatttgtcatgaaggcaaagcatacttccctcgtgaaggtgtttttgtgtttaatggcacttcttggtttattacacagaggaacttcttttctccacaaataattactacagacaatacatttgtctcaggaaattgtgatgtcgttattggcatcattaacaacacagtttatgatcctctgcaacctgagcttgactcattcaaagaagagctggacaagtacttcaaaaatcatacatcaccagatgttgatcttggcgacatttcaggcattaacgcttctgtcgtcaacattcaaaaagaaattgaccgcctcaatgaggtcgctaaaaatttaaatgaatcactcattgaccttcaagaattgggaaaatatgagcaatatattaaatggccttggtatgtttggctcggcttcattgctggactaattgccatcgtcatggttacaatcttgctttgttgcatgactagttgttgcagttgcctcaagggtgcatgctcttgtggttcttgctgcaagtttgatgaggatgactctgagccagttctcaagggtgtcaaattacattacacataa

SEQ ID NO: 29778 - DNA, 29751 bp, SARS Coronavirus
atattaggtttttacctacccaggaaaagccaaccaacctcgatctcttgtagatctgttctctaaacgaactttaaaatctgtgtagctgtcgctcggctgcatgcctagtgcacctacgcagtataaacaataataaattttactgtcgttgacaagaaacgagtaactcgtccctcttctgcagactgcttacggtttcgtccgtgttgcagtcgatcatcagcatacctaggtttcgtccgggtgtgaccgaaaggtaagatggagagccttgttcttggtgtcaacgagaaaacacacgtccaactcagtttgcctgtccttcaggttagagacgtgctagtgcgtggcttcggggactctgtggaagaggccctatcggaggcacgtgaacacctcaaaaatggcacttgtggtctagtagagctggaaaaaggcgtactgccccagcttgaacagccctatgtgttcattaaacgttctgatgccttaagcaccaatcacggccacaaggtcgttgagctggttgcagaaatggacggcattcagtacggtcgtagcggtataacactgggagtactcgtgccacatgtgggcaaaaccccaattgcataccgcaatgttcttcttcgtaagaacggtaataagggagccggtggtcatagctatggcatcgatctaaagtcttatgacttaggtgacgagcttggcactgatcccattgaagattatgaacaaaactggaacactaagcatggcagtggtgcactccgtgaactcactcgtgagctcaatggaggtgcagtcactcgctatgtcgacaacaatttctgtggcccagatgggtaccctcttgattgcatcaaagattttctcgcacgcgcgggcaagtcaatgtgcactctttccgaacaacttgattacatcgagtcgaagagaggtgtctactgctgccgtgaccatgagcatgaaattgcctggttcactgagcgctctgataagagctacgagcaccagacacccttcgaaattaagagtgccaagaaatttgacactttcaaaggggaatgcccaaagtttgtgtttcctcttaactcaaaagtcaaagtcattcaaccacgtgttgaaaagaaaaagactgagggtttcatggggcgtatacgctctgtgtaccctgttgcatctccacaggagtgtaacaatatgcacttgtctaccttgatgaaatgtaatcattgcgatgaagtttcatggcagacgtgcgactttctgaaagccacttgtgaacattgtggcactgaaaatttagttattgaaggacctactacatgtgggtacctacctactaatgctgtagtgaaaatgccatgtcctgcctgtcaagacccagagattggacctgagcatagtgttgcagattatcacaaccactcaaacattgaaactcgactccgcaagggaggtaggactagatgttttggaggctgtgtgtttgcctatgttggctgctataataagcgtgcctactgggttcctcgtgctagtgctgatattggctcaggccatactggcattactggtgacaatgtggagaccttgaatgaggatctccttgagatactgagtcgtgaacgtgttaacattaacattgttggcgattttcatttgaatgaagaggttgccatcattttggcatctttctctgcttctacaagtgcctttattgacactataaagagtcttgattacaagtctttcaaaaccattgttgagtcctgcggtaactataaagttaccaagggaaagcccgtaaaaggtgcttggaacattggacaacagagatcagttttaacaccactgtgtggttttccctcacaggctgctggtgttatcagatcaatttttgcgcgcacacttgatgcagcaaaccactcaattcctgatttgcaaagagcagctgtcaccatacttgatggtatttctgaacagtcattacgtcttgtcgacgccatggtttatacttcagacctgctcaccaacagtgtcattattatggcatatgtaactggtggtcttgtacaacagacttctcagtggttgtctaatcttttgggcactactgttgaaaaactcaggcctatctttgaatggattgaggcgaaacttagtgcaggagttgaatttctcaaggatgcttgggagattctcaaatttctcattacaggtgtttttgacatcgtcaagggtcaaatacaggttgcttcagataacatcaaggattgtgtaaaatgcttcattgatgttgttaacaaggcactcgaaatgtgcattgatcaagtcactatcgctggcgcaaagttgcgatcactcaacttaggtgaagtcttcatcgctcaaagcaagggactttaccgtcagtgtatacgtggcaaggagcagctgcaactactcatgcctcttaaggcaccaaaagaagtaacctttcttgaaggtgattcacatgacacagtacttacctctgaggaggttgttctcaagaacggtgaactcgaagcactcgagacgcccgttgatagcttcacaaatggagctatcgttggcacaccagtctgtgtaaatggcctcatgctcttagagattaaggacaaagaacaatactgcgcattgtctcctggtttactggctacaaacaatgtctttcgcttaaaagggggtgcaccaattaaaggtgtaacctttggagaagatactgtttgggaagttcaaggttacaagaatgtgagaatcacatttgagcttgatgaacgtgttgacaaagtgcttaatgaaaagtgctctgtctacactgttgaatccggtaccgaagttactgagtttgcatgtgttgtagcagaggctgttgtgaagactttacaaccagtttctgatctccttaccaacatgggtattgatcttgatgagtggagtgtagctacattctacttatttgatgatgctggtgaagaaaacttttcatcacgtatgtattgttccttttaccctccagatgaggaagaagaggacgatgcagagtgtgaggaagaagaaattgatgaaacctgtgaacatgagtacggtacagaggatgattatcaaggtctccctctggaatttggtgcctcagctgaaacagttcgagttgaggaagaagaagaggaagactggctggatgatactactgagcaatcagagattgagccagaaccagaacctacacctgaagaaccagttaatcagtttactggttatttaaaacttactgacaatgttgccattaaatgtgttgacatcgttaaggaggcacaaagtgctaatcctatggtgattgtaaatgctgctaacatacacctgaaacatggtggtggtgtagcaggtgcactcaacaaggcaaccaatggtgccatgcaaaaggagagtgatgattacattaagctaaatggccctcttacagtaggagggtcttgtttgctttctggacataatcttgctaagaagtgtctgcatgttgttggacctaacctaaatgcaggtgaggacatccagcttcttaaggcagcatatgaaaatttcaattcacaggacatcttacttgcaccattgttgtcagcaggcatatttggtgctaaaccacttcagtctttacaagtgtgcgtgcagacggttcgtacacaggtttatattgcagtcaatgacaaagctctttatgagcaggttgtcatggattatcttgataacctgaagcctagagtggaagcacctaaacaagaggagccaccaaacacagaagattccaaaactgaggagaaatctgtcgtacagaagcctgtcgatgtgaagccaaaaattaaggcctgcattgatgaggttaccacaacactggaagaaactaagtttcttaccaataagttactcttgtttgctgatatcaatggtaagctttaccatgattctcagaacatgcttagaggtgaagatatgtctttccttgagaaggatgcaccttacatggtaggtgatgttatcactagtggtgatatcacttgtgttgtaataccctccaaaaaggctggtggcactactgagatgctctcaagagctttgaagaaagtgccagttgatgagtatataaccacgtaccctggacaaggatgtgctggttatacacttgaggaagctaagactgctcttaagaaatgcaaatctgcattttatgtactaccttcagaagcacctaatgctaaggaagagattctaggaactgtatcctggaatttgagagaaatgcttgctcatgctgaagagacaagaaaattaatgcctatatgcatggatgttagagccataatggcaaccatccaacgtaagtataaaggaattaaaattcaagagggcatcgttgactatggtgtccgattcttcttttatactagtaaagagcctgtagcttctattattacgaagctgaactctctaaatgagccgcttgtcacaatgccaattggttatgtgacacatggttttaatcttgaagaggctgcgcgctgtatgcgttctcttaaagctcctgccgtagtgtcagtatcatcaccagatgctgttactacatataatggatacctcacttcgtcatcaaagacatctgaggagcactttgtagaaacagtttctttggctggctcttacagagattggtcctattcaggacagcgtacagagttaggtgttgaatttcttaagcgtggtgacaaaattgtgtaccacactctggagagccccgtcgagtttcatcttgacggtgaggttctttcacttgacaaactaaagagtctcttatccctgcgggaggttaagactataaaagtgttcacaactgtggacaacactaatctccacacacagcttgtggatatgtctatgacatatggacagcagtttggtccaacatacttggatggtgctgatgttacaaaaattaaacctcatgtaaatcatgagggtaagactttctttgtactacctagtgatgacacactacgtagtgaagctttcgagtactaccatactcttgatgagagttttcttggtaggtacatgtctgctttaaaccacacaaagaaatggaaatttcctcaagttggtggtttaacttcaattaaatgggctgataacaattgttatttgtctagtgttttattagcacttcaacagcttgaagtcaaattcaatgcaccagcacttcaagaggcttattatagagcccgtgctggtgatgctgctaacttttgtgcactcatactcgcttacagtaataaaactgttggcgagcttggtgatgtcagagaaactatgacccatcttctacagcatgctaatttggaatctgcaaagcgagttcttaatgtggtgtgtaaacattgtggtcagaaaactactaccttaacgggtgtagaagctgtgatgtatatgggtactctatcttatgataatcttaagacaggtgtttccattccatgtgtgtgtggtcgtgatgctacacaatatctagtacaacaagagtcttcttttgttatgatgtctgcaccacctgctgagtataaattacagcaaggtacattcttatgtgcgaatgagtacactggtaactatcagtgtggtcattacactcatataactgctaaggagaccctctatcgtattgacggagctcaccttacaaagatgtcagagtacaaaggaccagtgactgatgttttctacaaggaaacatcttacactacaaccatcaagcctgtgtcgtataaactcgatggagttacttacacagagattgaaccaaaattggatgggtattataaaaaggataatgcttactatacagagcagcctatagaccttgtaccaactcaaccattaccaaatgcgagttttgataatttcaaactcacatgttctaacacaaaatttgctgatgatttaaatcaaatgacaggcttcacaaagccagcttcacgagagctatctgtcacattcttcccagacttgaatggcgatgtagtggctattgactatagacactattcagcgagtttcaagaaaggtgctaaattactgcataagccaattgtttggcacattaaccaggctacaaccaagacaacgttcaaaccaaacacttggtgtttacgttgtctttggagtacaaagccagtagatacttcaaattcatttgaagttctggcagtagaagacacacaaggaatggacaatcttgcttgtgaaagtcaacaacccacctctgaagaagtagtggaaaatcctaccatacagaaggaagtcatagagtgtgacgtgaaaactaccgaagttgtaggcaatgtcatacttaaaccatcagatgaaggtgttaaagtaacacaagagttaggtcatgaggatcttatggctgcttatgtggaaaacacaagcattaccattaagaaacctaatgagctttcactagccttaggtttaaaaacaattgccactcatggtattgctgcaattaatagtgttccttggagtaaaattttggcttatgtcaaaccattcttaggacaagcagcaattacaacatcaaattgcgctaagagattagcacaacgtgtgtttaacaattatatgccttatgtgtttacattattgttccaattgtgtacttttactaaaagtaccaattctagaattagagcttcactacctacaactattgctaaaaatagtgttaagagtgttgctaaattatgtttggatgccggcattaattatgtgaagtcacccaaattttctaaattgttcacaatcgctatgtggctattgttgttaagtatttgcttaggttctctaatctgtgtaactgctgcttttggtgtactcttatctaattttggtgctccttcttattgtaatggcgttagagaattgtatcttaattcgtctaacgttactactatggatttctgtgaaggttcttttccttgcagcatttgtttaagtggattagactcccttgattcttatccagctcttgaaaccattcaggtgacgatttcatcgtacaagctagacttgacaattttaggtctggccgctgagtgggttttggcatatatgttgttcacaaaattcttttatttattaggtctttcagctataatgcaggtgttctttggctattttgctagtcatttcatcagcaattcttggctcatgtggtttatcattagtattgtacaaatggcacccgtttctgcaatggttaggatgtacatcttctttgcttctttctactacatatggaagagctatgttcatatcatggatggttgcacctcttcgacttgcatgatgtgctataagcgcaatcgtgccacacgcgttgagtgtacaactattgttaatggcatgaagagatctttctatgtctatgcaaatggaggccgtggcttctgcaagactcacaattggaattgtctcaattgtgacacattttgcactggtagtacattcattagtgatgaagttgctcgtgatttgtcactccagtttaaaagaccaatcaaccctactgaccagtcatcgtatattgttgatagtgttgctgtgaaaaatggcgcgcttcacctctactttgacaaggctggtcaaaagacctatgagagacatccgctctcccattttgtcaatttagacaatttgagagctaacaacactaaaggttcactgcctattaatgtcatagtttttgatggcaagtccaaatgcgacgagtctgcttctaagtctgcttctgtgtactacagtcagctgatgtgccaacctattctgttgcttgaccaagctcttgtatcagacgttggagatagtactgaagtttccgttaagatgtttgatgcttatgtcgacaccttttcagcaacttttagtgttcctatggaaaaacttaaggcacttgttgctacagctcacagcgagttagcaaagggtgtagctttagatggtgtcctttctacattcgtgtcagctgcccgacaaggtgttgttgataccgatgttgacacaaaggatgttattgaatgtctcaaactttcacatcactctgacttagaagtgacaggtgacagttgtaacaatttcatgctcacctataataaggttgaaaacatgacgcccagagatcttggcgcatgtattgactgtaatgcaaggcatatcaatgcccaagtagcaaaaagtcacaatgtttcactcatctggaatgtaaaagactacatgtctttatctgaacagctgcgtaaacaaattcgtagtgctgccaagaagaacaacataccttttagactaacttgtgctacaactagacaggttgtcaatgtcataactactaaaatctcactcaagggtggtaagattgttagtacttgttttaaacttatgcttaaggccacattattgtgcgttcttgctgcattggtttgttatatcgttatgccagtacatacattgtcaatccatgatggttacacaaatgaaatcattggttacaaagccattcaggatggtgtcactcgtgacatcatttctactgatgattgttttgcaaataaacatgctggttttgacgcatggtttagccagcgtggtggttcatacaaaaatgacaaaagctgccctgtagtagctgctatcattacaagagagattggtttcatagtgcctggcttaccgggtactgtgctgagagcaatcaatggtgacttcttgcattttctacctcgtgtttttagtgctgttggcaacatttgctacacaccttccaaactcattgagtatagtgattttgctacctctgcttgcgttcttgctgctgagtgtacaatttttaaggatgctatgggcaaacctgtgccatattgttatgacactaatttgctagagggttctatttcttatagtgagcttcgtccagacactcgttatgtgcttatggatggttccatcatacagtttcctaacacttacctggagggttctgttagagtagtaacaacttttgatgctgagtactgtagacatggtacatgcgaaaggtcagaagtaggtatttgcctatctaccagtggtagatgggttcttaataatgagcattacagagctctatcaggagttttctgtggtgttgatgcgatgaatctcatagctaacatctttactcctcttgtgcaacctgtgggtgctttagatgtgtctgcttcagtagtggctggtggtattattgccatattggtgacttgtgctgcctactactttatgaaattcagacgtgtttttggtgagtacaaccatgttgttgctgctaatgcacttttgtttttgatgtctttcactatactctgtctggtaccagcttacagctttctgccgggagtctactcagtcttttacttgtacttgacattctatttcaccaatgatgtttcattcttggctcaccttcaatggtttgccatgttttctcctattgtgcctttttggataacagcaatctatgtattctgtatttctctgaagcactgccattggttctttaacaactatcttaggaaaagagtcatgtttaatggagttacatttagtaccttcgaggaggctgctttgtgtacctttttgctcaacaaggaaatgtacctaaaattgcgtagcgagacactgttgccacttacacagtataacaggtatcttgctctatataacaagtacaagtatttcagtggagccttagatactaccagctatcgtgaagcagcttgctgccacttagcaaaggctctaaatgactttagcaactcaggtgctgatgttctctaccaaccaccacagacatcaatcacttctgctgttctgcagagtggttttaggaaaatggcattcccgtcaggcaaagttgaagggtgcatggtacaagtaacctgtggaactacaactcttaatggattgtggttggatgacacagtatactgtccaagacatgtcatttgcacagcagaagacatgcttaatcctaactatgaagatctgctcattcgcaaatccaaccatagctttcttgttcaggctggcaatgttcaacttcgtgttattggccattctatgcaaaattgtctgcttaggcttaaagttgatacttctaaccctaagacacccaagtataaatttgtccgtatccaacctggtcaaacattttcagttctagcatgctacaatggttcaccatctggtgtttatcagtgtgccatgagacctaatcataccattaaaggttctttccttaatggatcatgtggtagtgttggttttaacattgattatgattgcgtgtctttctgctatatgcatcatatggagcttccaacaggagtacacgctggtactgacttagaaggtaaattctatggtccatttgttgacagacaaactgcacaggctgcaggtacagacacaaccataacattaaatgttttggcatggctgtatgctgctgttatcaatggtgataggtggtttcttaatagattcaccactactttgaatgactttaaccttgtggcaatgaagtacaactatgaacctttgacacaagatcatgttgacatattgggacctctttctgctcaaacaggaattgccgtcttagatatgtgtgctgctttgaaagagctgctgcagaatggtatgaatggtcgtactatccttggtagcactattttagaagatgagtttacaccatttgatgttgttagacaatgctctggtgttaccttccaaggtaagttcaagaaaattgttaagggcactcatcattggatgcttttaactttcttgacatcactattgattcttgttcaaagtacacagtggtcactgtttttctttgtttacgagaatgctttcttgccatttactcttggtattatggcaattgctgcatgtgctatgctgcttgttaagcataagcacgcattcttgtgcttgtttctgttaccttctcttgcaacagttgcttactttaatatggtctacatgcctgctagctgggtgatgcgtatcatgacatggcttgaattggctgacactagcttgtctggttataggcttaaggattgtgttatgtatgcttcagctttagttttgcttattctcatgacagctcgcactgtttatgatgatgctgctagacgtgtttggacactgatgaatgtcattacacttgtttacaaagtctactatggtaatgctttagatcaagctatttccatgtgggccttagttatttctgtaacctctaactattctggtgtcgttacgactatcatgtttttagctagagctatagtgtttgtgtgtgttgagtattacccattgttatttattactggcaacaccttacagtgtatcatgcttgtttattgtttcttaggctattgttgctgctgctactttggccttttctgtttactcaaccgttacttcaggcttactcttggtgtttatgactacttggtctctacacaagaatttaggtatatgaactcccaggggcttttgcctcctaagagtagtattgatgctttcaagcttaacattaagttgttgggtattggaggtaaaccatgtatcaaggttgctactgtacagtctaaaatgtctgacgtaaagtgcacatctgtggtactgctctcggttcttcaacaacttagagtagagtcatcttctaaattgtgggcacaatgtgtacaactccacaatgatattcttcttgcaaaagacacaactgaagctttcgagaagatggtttctcttttgtctgttttgctatccatgcagggtgctgtagacattaataggttgtgcgaggaaatgctcgataaccgtgctactcttcaggctattgcttcagaatttagttctttaccatcatatgccgcttatgccactgcccaggaggcctatgagcaggctgtagctaatggtgattctgaagtcgttctcaaaaagttaaagaaatctttgaatgtggctaaatctgagtttgaccgtgatgctgccatgcaacgcaagttggaaaagatggcagatcaggctatgacccaaatgtacaaacaggcaagatctgaggacaagagggcaaaagtaactagtgctatgcaaacaatgctcttcactatgcttaggaagcttgataatgatgcacttaacaacattatcaacaatgcgcgtgatggttgtgttccactcaacatcataccattgactacagcagccaaactcatggttgttgtccctgattatggtacctacaagaacacttgtgatggtaacacctttacatatgcatctgcactctgggaaatccagcaagttgttgatgcggatagcaagattgttcaacttagtgaaattaacatggacaattcaccaaatttggcttggcctcttattgttacagctctaagagccaactcagctgttaaactacagaataatgaactgagtccagtagcactacgacagatgtcctgtgcggctggtaccacacaaacagcttgtactgatgacaatgcacttgcctactataacaattcgaagggaggtaggtttgtgctggcattactatcagaccaccaagatctcaaatgggctagattccctaagagtgatggtacaggtacaatttacacagaactggaaccaccttgtaggtttgttacagacacaccaaaagggcctaaagtgaaatacttgtacttcatcaaaggcttaaacaacctaaatagaggtatggtgctgggcagtttagctgctacagtacgtcttcaggctggaaatgctacagaagtacctgccaattcaactgtgctttccttctgtgcttttgcagtagaccctgctaaagcatataaggattacctagcaagtggaggacaaccaatcaccaactgtgtgaagatgttgtgtacacacactggtacaggacaggcaattactgtaacaccagaagctaacatggaccaagagtcctttggtggtgcttcatgttgtctgtattgtagatgccacattgaccatccaaatcctaaaggattctgtgacttgaaaggtaagtacgtccaaatacctaccacttgtgctaatgacccagtgggttttacacttagaaacacagtctgtaccgtctgcggaatgtggaaaggttatggctgtagttgtgaccaactccgcgaacccttgatgcagtctgcggatgcatcaacgtttttaaacgggtttgcggtgtaagtgcagcccgtcttacaccgtgcggcacaggcactagtactgatgtcgtctacagggcttttgatatttacaacgaaaaagttgctggttttgcaaagttcctaaaaactaattgctgtcgcttccaggagaaggatgaggaaggcaatttattagactcttactttgtagttaagaggcatactatgtctaactaccaacatgaagagactatttataacttggttaaagattgtccagcggttgctgtccatgactttttcaagtttagagtagatggtgacatggtaccacatatatcacgtcagcgtctaactaaatacacaatggctgatttagtctatgctctacgtcattttgatgagggtaattgtgatacattaaaagaaatactcgtcacatacaattgctgtgatgatgattatttcaataagaaggattggtatgacttcgtagagaatcctgacatcttacgcgtatatgctaacttaggtgagcgtgtacgccaatcattattaaagactgtacaattctgcgatgctatgcgtgatgcaggcattgtaggcgtactgacattagataatcaggatcttaatgggaactggtacgatttcggtgatttcgtacaagtagcaccaggctgcggagttcctattgtggattcatattactcattgctgatgcccatcctcactttgactagggcattggctgctgagtcccatatggatgctgatctcgcaaaaccacttattaagtgggatttgctgaaatatgattttacggaagagagactttgtctcttcgaccgttattttaaatattgggaccagacataccatcccaattgtattaactgtttggatgataggtgtatccttcattgtgcaaactttaatgtgttattttctactgtgtttccacctacaagttttggaccactagtaagaaaaatatttgtagatggtgttccttttgttgtttcaactggataccattttcgtgagttaggagtcgtacataatcaggatgtaaacttacatagctcgcgtctcagtttcaaggaacttttagtgtatgctgctgatccagctatgcatgcagcttctggcaatttattgctagataaacgcactacatgcttttcagtagctgcactaacaaacaatgttgcttttcaaactgtcaaacccggtaattttaataaagacttttatgactttgctgtgtctaaaggtttctttaaggaaggaagttctgttgaactaaaacacttcttctttgctcaggatggcaacgctgctatcagtgattatgactattatcgttataatctgccaacaatgtgtgatatcagacaactcctattcgtagttgaagttgttgataaatactttgattgttacgatggtggctgtattaatgccaaccaagtaatcgttaacaatctggataaatcagctggtttcccatttaataaatggggtaaggctagactttattatgactcaatgagttatgaggatcaagatgcacttttcgcgtatactaagcgtaatgtcatccctactataactcaaatgaatcttaagtatgccattagtgcaaagaatagagctcgcaccgtagctggtgtctctatctgtagtactatgacaaatagacagtttcatcagaaattattgaagtcaatagccgccactagaggagctactgtggtaattggaacaagcaagttttacggtggctggcataatatgttaaaaactgtttacagtgatgtagaaactccacaccttatgggttgggattatccaaaatgtgacagagccatgcctaacatgcttaggataatggcctctcttgttcttgctcgcaaacataacacttgctgtaacttatcacaccgtttctacaggttagctaacgagtgtgcgcaagtattaagtgagatggtcatgtgtggcggctcactatatgttaaaccaggtggaacatcatccggtgatgctacaactgcttatgctaatagtgtctttaacatttgtcaagctgttacagccaatgtaaatgcacttctttcaactgatggtaataagatagctgacaagtatgtccgcaatctacaacacaggctctatgagtgtctctatagaaatagggatgttgatcatgaattcgtggatgagttttacgcttacctgcgtaaacatttctccatgatgattctttctgatgatgccgttgtgtgctataacagtaactatgcggctcaaggtttagtagctagcattaagaactttaaggcagttctttattatcaaaataatgtgttcatgtctgaggcaaaatgttggactgagactgaccttactaaaggacctcacgaattttgctcacagcatacaatgctagttaaacaaggagatgattacgtgtacctgccttacccagatccatcaagaatattaggcgcaggctgttttgtcgatgatattgtcaaaacagatggtacacttatgattgaaaggttcgtgtcactggctattgatgcttacccacttacaaaacatcctaatcaggagtatgctgatgtctttcacttgtatttacaatacattagaaagttacatgatgagcttactggccacatgttggacatgtattccgtaatgctaactaatgataacacctcacggtactgggaacctgagttttatgaggctatgtacacaccacatacagtcttgcaggctgtaggtgcttgtgtattgtgcaattcacagacttcacttcgttgcggtgcctgtattaggagaccattcctatgttgcaagtgctgctatgaccatgtcatttcaacatcacacaaattagtgttgtctgttaatccctatgtttgcaatgccccaggttgtgatgtcactgatgtgacacaactgtatctaggaggtatgagctattattgcaagtcacataagcctcccattagttttccattatgtgctaatggtcaggtttttggtttatacaaaaacacatgtgtaggcagtgacaatgtcactgacttcaatgcgatagcaacatgtgattggactaatgctggcgattacatacttgccaacacttgtactgagagactcaagcttttcgcagcagaaacgctcaaagccactgaggaaacatttaagctgtcatatggtattgccactgtacgcgaagtactctctgacagagaattgcatctttcatgggaggttggaaaacctagaccaccattgaacagaaactatgtctttactggttaccgtgtaactaaaaatagtaaagtacagattggagagtacacctttgaaaaaggtgactatggtgatgctgttgtgtacagaggtactacgacatacaagttgaatgttggtgattactttgtgttgacatctcacactgtaatgccacttagtgcacctactctagtgccacaagagcactatgtgagaattactggcttgtacccaacactcaacatctcagatgagttttctagcaatgttgcaaattatcaaaaggtcggcatgcaaaagtactctacactccaaggaccacctggtactggtaagagtcattttgccatcggacttgctctctattacccatctgctcgcatagtgtatacggcatgctctcatgcagctgttgatgccctatgtgaaaaggcattaaaatatttgcccatagataaatgtagtagaatcatacctgcgcgtgcgcgcgtagagtgttttgataaattcaaagtgaattcaacactagaacagtatgttttctgcactgtaaatgcattgccagaaacaactgctgacattgtagtctttgatgaaatctctatggctactaattatgacttgagtgttgtcaatgctagacttcgtgcaaaacactacgtctatattggcgatcctgctcaattaccagccccccgcacattgctgactaaaggcacactagaaccagaatattttaattcagtgtgcagacttatgaaaacaataggtccagacatgttccttggaacttgtcgccgttgtcctgctgaaattgttgacactgtgagtgctttagtttatgacaataagctaaaagcacacaaggataagtcagctcaatgcttcaaaatgttctacaaaggtgttattacacatgatgtttcatctgcaatcaacagacctcaaataggcgttgtaagagaatttcttacacgcaatcctgcttggagaaaagctgtttttatctcaccttataattcacagaacgctgtagcttcaaaaatcttaggattgcctacgcagactgttgattcatcacagggttctgaatatgactatgtcatattcacacaaactactgaaacagcacactcttgtaatgtcaaccgcttcaatgtggctatcacaagggcaaaaattggcattttgtgcataatgtctgatagagatctttatgacaaactgcaatttacaagtctagaaataccacgtcgcaatgtggctacattacaagcagaaaatgtaactggactttttaaggactgtagtaagatcattactggtcttcatcctacacaggcacctacacacctcagcgttgatataaagttcaagactgaaggattatgtgttgacataccaggcataccaaaggacatgacctaccgtagactcatctctatgatgggtttcaaaatgaattaccaagtcaatggttaccctaatatgtttatcacccgcgaagaagctattcgtcacgttcgtgcgtggattggctttgatgtagagggctgtcatgcaactagagatgctgtgggtactaacctacctctccagctaggattttctacaggtgttaacttagtagctgtaccgactggttatgttgacactgaaaataacacagaattcaccagagttaatgcaaaacctccaccaggtgaccagtttaaacatcttataccactcatgtataaaggcttgccctggaatgtagtgcgtattaagatagtacaaatgctcagtgatacactgaaaggattgtcagacagagtcgtgttcgtcctttgggcgcatggctttgagcttacatcaatgaagtactttgtcaagattggacctgaaagaacgtgttgtctgtgtgacaaacgtgcaacttgcttttctacttcatcagatacttatgcctgctggaatcattctgtgggttttgactatgtctataacccatttatgattgatgttcagcagtggggctttacgggtaaccttcagagtaaccatgaccaacattgccaggtacatggaaatgcacatgtggctagttgtgatgctatcatgactagatgtttagcagtccatgagtgctttgttaagcgcgttgattggtctgttgaataccctattataggagatgaactgagggttaattctgcttgcagaaaagtacaacacatggttgtgaagtctgcattgcttgctgataagtttccagttcttcatgacattggaaatccaaaggctatcaagtgtgtgcctcaggctgaagtagaatggaagttctacgatgctcagccatgtagtgacaaagcttacaaaatagaggaactcttctattcttatgctacacatcacgataaattcactgatggtgtttgtttgttttggaattgtaacgttgatcgttacccagccaatgcaattgtgtgtaggtttgacacaagagtcttgtcaaacttgaacttaccaggctgtgatggtggtagtttgtatgtgaataagcatgcattccacactccagctttcgataaaagtgcatttactaatttaaagcaattgcctttcttttactattctgatagtccttgtgagtctcatggcaaacaagtagtgtcggatattgattatgttccactcaaatctgctacgtgtattacacgatgcaatttaggtggtgctgtttgcagacaccatgcaaatgagtaccgacagtacttggatgcatataatatgatgatttctgctggatttagcctatggatttacaaacaatttgatacttataacctgtggaatacatttaccaggttacagagtttagaaaatgtggcttataatgttgttaataaaggacactttgatggacacgccggcgaagcacctgtttccatcattaataatgctgtttacacaaaggtagatggtattgatgtggagatctttgaaaataagacaacacttcctgttaatgttgcatttgagctttgggctaagcgtaacattaaaccagtgccagagattaagatactcaataatttgggtgttgatatcgctgctaatactgtaatctgggactacaaaagagaagccccagcacatgtatctacaataggtgtctgcacaatgactgacattgccaagaaacctactgagagtgcttgttcttcacttactgtcttgtttgatggtagagtggaaggacaggtagacctttttagaaacgcccgtaatggtgttttaataacagaaggttcagtcaaaggtctaacaccttcaaagggaccagcacaagctagcgtcaatggagtcacattaattggagaatcagtaaaaacacagtttaactactttaagaaagtagacggcattattcaacagttgcctgaaacctactttactcagagcagagacttagaggattttaagcccagatcacaaatggaaactgactttctcgagctcgctatggatgaattcatacagcgatataagctcgagggctatgccttcgaacacatcgtttatggagatttcagtcatggacaacttggcggtcttcatttaatgataggcttagccaagcgctcacaagattcaccacttaaattagaggattttatccctatggacagcacagtgaaaaattacttcataacagatgcgcaaacaggttcatcaaaatgtgtgtgttctgtgattgatcttttacttgatgactttgtcgagataataaagtcacaagatttgtcagtgatttcaaaagtggtcaaggttacaattgactatgctgaaatttcattcatgctttggtgtaaggatggacatgttgaaaccttctacccaaaactacaagcaagtcaagcgtggcaaccaggtgttgcgatgcctaacttgtacaagatgcaaagaatgcttcttgaaaagtgtgaccttcagaattatggtgaaaatgctgttataccaaaaggaataatgatgaatgtcgcaaagtatactcaactgtgtcaatacttaaatacacttactttagctgtaccctacaacatgagagttattcactttggtgctggctctgataaaggagttgcaccaggtacagctgtgctcagacaatggttgccaactggcacactacttgtcgattcagatcttaatgacttcgtctccgacgcagattctactttaattggagactgtgcaacagtacatacggctaataaatgggaccttattattagcgatatgtatgaccctaggaccaaacatgtgacaaaagagaatgactctaaagaagggtttttcacttatctgtgtggatttataaagcaaaaactagccctgggtggttctatagctgtaaagataacagagcattcttggaatgctgacctttacaagcttatgggccatttctcatggtggacagcttttgttacaaatgtaaatgcatcatcatcggaagcatttttaattggggctaactatcttggcaagccgaaggaacaaattgatggctataccatgcatgctaactacattttctggaggaacacaaatcctatccagttgtcttcctattcactctttgacatgagcaaatttcctcttaaattaagaggaactgctgtaatgtctcttaaggagaatcaaatcaatgatatgatttattctcttctggaaaaaggtaggcttatcattagagaaaacaacagagttgtggtttcaagtgatattcttgttaacaactaaacgaacatgtttattttcttattatttcttactctcactagtggtagtgaccttgaccggtgcaccacttttgatgatgttcaagctcctaattacactcaacatacttcatctatgaggggggtttactatcctgatgaaatttttagatcagacactctttatttaactcaggatttatttcttccattttattctaatgttacagggtttcatactattaatcatacgtttggcaaccctgtcataccttttaaggatggtatttattttgctgccacagagaaatcaaatgttgtccgtggttgggtttttggttctaccatgaacaacaagtcacagtcggtgattattattaacaattctactaatgttgttatacgagcatgtaactttgaattgtgtgacaaccctttctttgctgtttctaaacccatgggtacacagacacatactatgatattcgataatgcatttaattgcactttcgagtacatatctgatgccttttcgcttgatgtttcagaaaagtcaggtaattttaaacacttacgagagtttgtgtttaaaaataaagatgggtttctctatgtttataagggctatcaacctatagatgtagttcgtgatctaccttctggttttaacactttgaaacctatttttaagttgcctcttggtattaacattacaaattttagagccattcttacagccttttcacctgctcaagacatttggggcacgtcagctgcagcctattttgttggctatttaaagccaactacatttatgctcaagtatgatgaaaatggtacaatcacagatgctgttgattgttctcaaaatccacttgctgaactcaaatgctctgttaagagctttgagattgacaaaggaatttaccagacctctaatttcagggttgttccctcaggagatgttgtgagattccctaatattacaaacttgtgtccttttggagaggtttttaatgctactaaattcccttctgtctatgcatgggagagaaaaaaaatttctaattgtgttgctgattactctgtgctctacaactcaacatttttttcaacctttaagtgctatggcgtttctgccactaagttgaatgatctttgcttctccaatgtctatgcagattcttttgtagtcaagggagatgatgtaagacaaatagcgccaggacaaactggtgttattgctgattataattataaattgccagatgatttcatgggttgtgtccttgcttggaatactaggaacattgatgctacttcaactggtaattataattataaatataggtatcttagacatggcaagcttaggccctttgagagagacatatctaatgtgcctttctcccctgatggcaaaccttgcaccccacctgctcttaattgttattggccattaaatgattatggtttttacaccactactggcattggctaccaaccttacagagttgtagtactttcttttgaacttttaaatgcaccggccacggtttgtggaccaaaattatccactgaccttattaagaaccagtgtgtcaattttaattttaatggactcactggtactggtgtgttaactccttcttcaaagagatttcaaccatttcaacaatttggccgtgatgtttctgatttcactgattccgttcgagatcctaaaacatctgaaatattagacatttcaccttgctcttttgggggtgtaagtgtaattacacctggaacaaatgcttcatctgaagttgctgttctatatcaagatgttaactgcactgatgtttctacagcaattcatgcagatcaactcacaccagcttggcgcatatattctactggaaacaatgtattccagactcaagcaggctgtcttataggagctgagcatgtcgacacttcttatgagtgcgacattcctattggagctggcatttgtgctagttaccatacagtttctttattacgtagtactagccaaaaatctattgtggcttatactatgtctttaggtgctgatagttcaattgcttactctaataacaccattgctatacctactaacttttcaattagcattactacagaagtaatgcctgtttctatggctaaaacctccgtagattgtaatatgtacatctgcggagattctactgaatgtgctaatttgcttctccaatatggtagcttttgcacacaactaaatcgtgcactctcaggtattgctgctgaacaggatcgcaacacacgtgaagtgttcgctcaagtcaaacaaatgtacaaaaccccaactttgaaatattttggtggttttaatttttcacaaatattacctgaccctctaaagccaactaagaggtcttttattgaggacttgctctttaataaggtgacactcgctgatgctggcttcatgaagcaatatggcgaatgcctaggtgatattaatgctagagatctcatttgtgcgcagaagttcaatggacttacagtgttgccacctctgctcactgatgatatgattgctgcctacactgctgctctagttagtggtactgccactgctggatggacatttggtgctggcgctgctcttcaaataccttttgctatgcaaatggcatataggttcaatggcattggagttacccaaaatgttctctatgagaaccaaaaacaaatcgccaaccaatttaacaaggcgattagtcaaattcaagaatcacttacaacaacatcaactgcattgggcaagctgcaagacgttgttaaccagaatgctcaagcattaaacacacttgttaaacaacttagctctaattttggtgcaatttcaagtgtgctaaatgatatcctttcgcgacttgataaagtcgaggcggaggtacaaattgacaggttaattacaggcagacttcaaagccttcaaacctatgtaacacaacaactaatcagggctgctgaaatcagggcttctgctaatcttgctgctactaaaatgtctgagtgtgttcttggacaatcaaaaagagttgacttttgtggaaagggctaccaccttatgtccttcccacaagcagccccgcatggtgttgtcttcctacatgtcacgtatgtgccatcccaggagaggaacttcaccacagcgccagcaatttgtcatgaaggcaaagcatacttccctcgtgaaggtgtttttgtgtttaatggcacttcttggtttattacacagaggaacttcttttctccacaaataattactacagacaatacatttgtctcaggaaattgtgatgtcgttattggcatcattaacaacacagtttatgatcctctgcaacctgagcttgactcattcaaagaagagctggacaagtacttcaaaaatcatacatcaccagatgttgatcttggcgacatttcaggcattaacgcttctgtcgtcaacattcaaaaagaaattgaccgcctcaatgaggtcgctaaaaatttaaatgaatcactcattgaccttcaagaattgggaaaatatgagcaatatattaaatggccttggtatgtttggctcggcttcattgctggactaattgccatcgtcatggttacaatcttgctttgttgcatgactagttgttgcagttgcctcaagggtgcatgctcttgtggttcttgctgcaagtttgatgaggatgactctgagccagttctcaagggtgtcaaattacattacacataaacgaacttatggatttgtttatgagattttttactcttggatcaattactgcacagccagtaaaaattgacaatgcttctcctgcaagtactgttcatgctacagcaacgataccgctacaagcctcactccctttcggatggcttgttattggcgttgcatttcttgctgtttttcagagcgctaccaaaataattgcgctcaataaaagatggcagctagccctttataagggcttccagttcatttgcaatttactgctgctatttgttaccatctattcacatcttttgcttgtcgctgcaggtatggaggcgcaatttttgtacctctatgccttgatatattttctacaatgcatcaacgcatgtagaattattatgagatgttggctttgttggaagtgcaaatccaagaacccattactttatgatgccaactactttgtttgctggcacacacataactatgactactgtataccatataacagtgtcacagatacaattgtcgttactgaaggtgacggcatttcaacaccaaaactcaaagaagactaccaaattggtggttattctgaggataggcactcaggtgttaaagactatgtcgttgtacatggctatttcaccgaagtttactaccagcttgagtctacacaaattactacagacactggtattgaaaatgctacattcttcatctttaacaagcttgttaaagacccaccgaatgtgcaaatacacacaatcgacggctcttcaggagttgctaatccagcaatggatccaatttatgatgagccgacgacgactactagcgtgcctttgtaagcacaagaaagtgagtacgaacttatgtactcattcgtttcggaagaaacaggtacgttaatagttaatagcgtacttctttttcttgctttcgtggtattcttgctagtcacactagccatccttactgcgcttcgattgtgtgcgtactgctgcaatattgttaacgtgagtttagtaaaaccaacggtttacgtctactcgcgtgttaaaaatctgaactcttctgaaggagttcctgatcttctggtctaaacgaactaactattattattattctgtttggaactttaacattgcttatcatggcagacaacggtactattaccgttgaggagcttaaacaactcctggaacaatggaacctagtaataggtttcctattcctagcctggattatgttactacaatttgcctattctaatcggaacaggtttttgtacataataaagcttgttttcctctggctcttgtggccagtaacacttgcttgttttgtgcttgctgctgtctacagaattaattgggtgactggcgggattgcgattgcaatggcttgtattgtaggcttgatgtggcttagctacttcgttgcttccttcaggctgtttgctcgtacccgctcaatgtggtcattcaacccagaaacaaacattcttctcaatgtgcctctccgggggacaattgtgaccagaccgctcatggaaagtgaacttgtcattggtgctgtgatcattcgtggtcacttgcgaatggccggacactccctagggcgctgtgacattaaggacctgccaaaagagatcactgtggctacatcacgaacgctttcttattacaaattaggagcgtcgcagcgtgtaggcactgattcaggttttgctgcatacaaccgctaccgtattggaaactataaattaaatacagaccacgccggtagcaacgacaatattgctttgctagtacagtaagtgacaacagatgtttcatcttgttgacttccaggttacaatagcagagatattgattatcattatgaggactttcaggattgctatttggaatcttgacgttataataagttcaatagtgagacaattatttaagcctctaactaagaagaattattcggagttagatgatgaagaacctatggagttarattatccataaaacgaacatgaaaattattctcttcctgacattgattgtatttacatcttgcgagctatatcactatcaggagtgtgttagaggtacgactgtactactaaaagaaccttgcccatcaggaacatacgagggcaattcaccatttcaccctcttgctgacaataaatttgcactaacttgcactagcacacactttgcttttgcttgtgctgacggtactcgacatacctatcagctgcgtgcaagatcagtttcaccaaaacttttcatcagacaagaggaggttcaacaagagctctactcgccactttttctcattgttgctgctctagtatttttaatactttgcttcaccattaagagaaagacagaatgaatgagctcactttaattgacttctatttgtgctttttagcctttctgctattccttgttttaataatgcttattatattttggttttcactcgaaatccaggatctagaagaaccttgtaccaaagtctaaacgaacatgaaacttctcattgttttgacttgtatttctctatgcagttgcatatgcactgtagtacagcgctgtgcatctaataaacctcatgtgcttgaagatccttgtaaggtacaacactaggggtaatacttatagcactgcttggctttgtgctctaggaaaggttttaccttttcatagatggcacactatggttcaaacatgcacacctaatgttactatcaactgtcaagatccagctggtggtgcgcttatagctaggtgttggtaccttcatgaaggtcaccaaactgctgcatttagagacgtacttgttgttttaaataaacgaacaaattaaaatgtctgataatggaccccaatcaaaccaacgtagtgccccccgcattacatttggtggacccacagattcaactgacaataaccagaatggaggacgcaatggggcaaggccaaaacagcgccgaccccaaggtttacccaataatactgcgtcttggttcacagctctcactcagcatggcaaggaggaacttagattccctcgaggccagggcgttccaatcaacaccaatagtggtccagatgaccaaattggctactaccgaagagctacccgacgagttcgtggtggtgacggcaaaatgaaagagctcagccccagatggtacttctattacctaggaactggcccagaagcttcacttccctacggcgctaacaaagaaggcatcgtatgggttgcaactgagggagccttgaatacacccaaagaccacattggcacccgcaatcctaataacaatgctgccaccgtgctacaacttcctcaaggaacaacattgccaaaaggcttctacgcagagggaagcagaggcggcagtcaagcctcttctcgctcctcatcacgtagtcgcggtaattcaagaaattcaactcctggcagcagtaggggaaattctcctgctcgaatggctagcggaggtggtgaaactgccctcgcgctattgctgctagacagattgaaccagcttgagagcaaagtttctggtaaaggccaacaacaacaaggccaaactgtcactaagaaatctgctgctgaggcatctaaaaagcctcgccaaaaacgtactgccacaaaacagtacaacgtcactcaagcatttgggagacgtggtccagaacaaacccaaggaaatttcggggaccaagacctaatcagacaaggaactgattacaaacattggccgcaaattgcacaatttgctccaagtgcctctgcattctttggaatgtcacgcattggcatggaagtcacaccttcgggaacatggctgacttatcatggagccattaaattggatgacaaagatccacaattcaaagacaacgtcatactgctgaacaagcacattgacgcatacaaaacattcccaccaacagagcctaaaaaggacaaaaagaaaaagactgatgaagctcagcctttgccgcagagacaaaagaagcagcccactgtgactcttcttcctgcggctgacatggatgatttctccagacaacttcaaaattccatgagtggagcttctgctgattcaactcaggcataaacactcatgatgaccacacaaggcagatgggctatgtaaacgttttcgcaattccgtttacgatacatagtctactcttgtgcagaatgaattctcgtaactaaacagcacaagtaggtttagttaactttaatctcacatagcaatctttaatcaatgtgtaacattagggaggacttgaaagagccaccacattttcatcgaggccacgcggagtacgatcgagggtacagtgaataatgctagggagagctgcctatatggaagagccctaatgtgtaaaattaattttagtagtgctatccccatgtgattttaatagcttcttaggagaatgacaaaaaaaaaaaaaaaaaaaaaaaa

SEQ ID NO: 29779 - DNA, 29711 bp, SARS Coronavirus
tacccaggaaaagccaaccaacctcgatctcttgtagatctgttctctaaacgaactttaaaatctgtgtagctgtcgctcggctgcatgcctagtgcacctacgcagtataaacaataataaattttactgtcgttgacaagaaacgagtaactcgtccctcttctgcagactgcttacggtttcgtccgtgttgcagtcgatcatcagcatacctaggtttcgtccgggtgtgaccgaaaggtaagatggagagccttgttcttggtgtcaacgagaaaacacacgtccaactcagtttgcctgtccttcaggttagagacgtgctagtgcgtggcttcggggactctgtggaagaggccctatcggaggcacgtgaacacctcaaaaatggcacttgtggtctagtagagctggaaaaaggcgtactgccccagcttgaacagccctatgtgttcattaaacgttctgatgccttaagcaccaatcacggccacaaggtcgttgagctggttgcagaaatggacggcattcagtacggtcgtagcggtataacactgggagtactcgtgccacatgtgggcgaaaccccaattgcataccgcaatgttcttcttcgtaagaacggtaataagggagccggtggtcatagctatggcatcgatctaaagtcttatgacttaggtgacgagcttggcactgatcccattgaagattatgaacaaaactggaacactaagcatggcagtggtgcactccgtgaactcactcgtgagctcaatggaggtgcagtcactcgctatgtcgacaacaatttctgtggcccagatgggtaccctcttgattgcatcaaagattttctcgcacgcgcgggcaagtcaatgtgcactctttccgaacaacttgattacatcgagtcgaagagaggtgtctactgctgccgtgaccatgagcatgaaattgcctggttcactgagcgctctgataagagctacgagcaccagacacccttcgaaattaagagtgccaagaaatttgacactttcaaaggggaatgcccaaagtttgtgtttcctcttaactcaaaagtcaaagtcattcaaccacgtgttgaaaagaaaaagactgagggtttcatggggcgtatacgctctgtgtaccctgttgcatctccacaggagtgtaacaatatgcacttgtctaccttgatgaaatgtaatcattgcgatgaagtttcatggcagacgtgcgactttctgaaagccacttgtgaacattgtggcactgaaaatttagttattgaaggacctactacatgtgggtacctacctactaatgctgtagtgaaaatgccatgtcctgcctgtcaagacccagagattggacctgagcatagtgttgcagattatcacaaccactcaaacattgaaactcgactccgcaagggaggtaggactagatgttttggaggctgtgtgtttgcctatgttggctgctataataagcgtgcctactgggttcctcgtgctagtgctgatattggctcaggccatactggcattactggtgacaatgtggagaccttgaatgaggatctccttgagatactgagtcgtgaacgtgttaacattaacattgttggcgattttcatttgaatgaagaggttgccatcattttggcatctttctctgcttctacaagtgcctttattgacactataaagagtcttgattacaagtctttcaaaaccattgttgagtcctgcggtaactataaagttaccaagggaaagcccgtaaaaggtgcttggaacattggacaacagagatcagttttaacaccactgtgtggttttccctcacaggctgctggtgttatcagatcaatttttgcgcgcacacttgatgcagcaaaccactcaattcctgatttgcaaagagcagctgtcaccatacttgatggtatttctgaacagtcattacgtcttgtcgacgccatggtttatacttcagacctgctcaccaacagtgtcattattatggcatatgtaactggtggtcttgtacaacagacttctcagtggttgtctaatcttttgggcactactgttgaaaaactcaggcctatctttgaatggattgaggcgaaacttagtgcaggagttgaatttctcaaggatgcttgggagattctcaaatttctcattacaggtgtttttgacatcgtcaagggtcaaatacaggttgcttcagataacatcaaggattgtgtaaaatgcttcattgatgttgttaacaaggcactcgaaatgtgcattgatcaagtcactatcgctggcgcaaagttgcgatcactcaacttaggtgaagtcttcatcgctcaaagcaagggactttaccgtcagtgtatacgtggcaaggagcagctgcaactactcatgcctcttaaggcaccaaaagaagtaacctttcttgaaggtgattcacatgacacagtacttacctctgaggaggttgttctcaagaacggtgaactcgaagcactcgagacgcccgttgatagcttcacaaatggagctatcgttggcacaccagtctgtgtaaatggcctcatgctcttagagattaaggacaaagaacaatactgcgcattgtctcctggtttactggctacaaacaatgtctttcgcttaaaagggggtgcaccaattaaaggtgtaacctttggagaagatactgtttgggaagttcaaggttacaagaatgtgagaatcacatttgagcttgatgaacgtgttgacaaagtgcttaatgaaaagtgctctgtctacactgttgaatccggtaccgaagttactgagtttgcatgtgttgtagcagaggctgttgtgaagactttacaaccagtttctgatctccttaccaacatgggtattgatcttgatgagtggagtgtagctacattctacttatttgatgatgctggtgaagaaaacttttcatcacgtatgtattgttccttttaccctccagatgaggaagaagaggacgatgcagagtgtgaggaagaagaaattgatgaaacctgtgaacatgagtacggtacagaggatgattatcaaggtctccctctggaatttggtgcctcagctgaaacagttcgagttgaggaagaagaagaggaagactggctggatgatactactgagcaatcagagattgagccagaaccagaacctacacctgaagaaccagttaatcagtttactggttatttaaaacttactgacaatgttgccattaaatgtgttgacatcgttaaggaggcacaaagtgctaatcctatggtgattgtaaatgctgctaacatacacctgaaacatggtggtggtgtagcaggtgcactcaacaaggcaaccaatggtgccatgcaaaaggagagtgatgattacattaagctaaatggccctcttacagtaggagggtcttgtttgctttctggacataatcttgctaagaagtgtctgcatgttgttggacctaacctaaatgcaggtgaggacatccagcttcttaaggcagcatatgaaaatttcaattcacaggacatcttacttgcaccattgttgtcagcaggcatatttggtgctaaaccacttcagtctttacaagtgtgcgtgcagacggttcgtacacaggtttatattgcagtcaatgacaaagctctttatgagcaggttgtcatggattatcttgataacctgaagcctagagtggaagcacctaaacaagaggagccaccaaacacagaagattccaaaactgaggagaaatctgtcgtacagaagcctgtcgatgtgaagccaaaaattaaggcctgcattgatgaggttaccacaacactggaagaaactaagtttcttaccaataagttactcttgtttgctgatatcaatggtaagctttaccatgattctcagaacatgcttagaggtgaagatatgtctttccttgagaaggatgcaccttacatggtaggtgatgttatcactagtggtgatatcacttgtgttgtaataccctccaaaaaggctggtggcactactgagatgctctcaagagctttgaagaaagtgccagttgatgagtatataaccacgtaccctggacaaggatgtgctggttatacacttgaggaagctaagactgctcttaagaaatgcaaatctgcattttatgtactaccttcagaagcacctaatgctaaggaagagattctaggaactgtatcctggaatttgagagaaatgcttgctcatgctgaagagacaagaaaattaatgcctatatgcatggatgttagagccataatggcaaccatccaacgtaagtataaaggaattaaaattcaagagggcatcgttgactatggtgtccgattcttcttttatactagtaaagagcctgtagcttctattattacgaagctgaactctctaaatgagccgcttgtcacaatgccaattggttatgtgacacatggttttaatcttgaagaggctgcgcgctgtatgcgttctcttaaagctcctgccgtagtgtcagtatcatcaccagatgctgttactacatataatggatacctcacttcgtcatcaaagacatctgaggagcactttgtagaaacagtttctttggctggctcttacagagattggtcctattcaggacagcgtacagagttaggtgttgaatttcttaagcgtggtgacaaaattgtgtaccacactctggagagccccgtcgagtttcatcttgacggtgaggttctttcacttgacaaactaaagagtctcttatccctgcgggaggttaagactataaaagtgttcacaactgtggacaacactaatctccacacacagcttgtggatatgtctatgacatatggacagcagtttggtccaacatacttggatggtgctgatgttacaaaaattaaacctcatgtaaatcatgagggtaagactttctttgtactacctagtgatgacacactacgtagtgaagctttcgagtactaccatactcttgatgagagttttcttggtaggtacatgtctgctttaaaccacacaaagaaatggaaatttcctcaagttggtggtttaacttcaattaaatgggctgataacaattgttatttgtctagtgttttattagcacttcaacagcttgaagtcaaattcaatgcaccagcacttcaagaggcttattatagagcccgtgctggtgatgctgctaacttttgtgcactcatactcgcttacagtaataaaactgttggcgagcttggtgatgtcagagaaactatgacccatcttctacagcatgctaatttggaatctgcaaagcgagttcttaatgtggtgtgtaaacattgtggtcagaaaactactaccttaacgggtgtagaagctgtgatgtatatgggtactctatcttatgataatcttaagacaggtgtttccattccatgtgtgtgtggtcgtgatgctacacaatatctagtacaacaagagtcttcttttgttatgatgtctgcaccacctgctgagtataaattacagcaaggtacattcttatgtgcgaatgagtacactggtaactatcagtgtggtcattacactcatataactgctaaggagaccctctatcgtattgacggagctcaccttacaaagatgtcagagtacaaaggaccagtgactgatgttttctacaaggaaacatcttacactacaaccatcaagcctgtgtcgtataaactcgatggagttacttacacagagattgaaccaaaattggatgggtattataaaaaggataatgcttactatacagagcagcctatagaccttgtaccaactcaaccattaccaaatgcgagttttgataatttcaaactcacatgttctaacacaaaatttgctgatgatttaaatcaaatgacaggcttcacaaagccagcttcacgagagctatctgtcacattcttcccagacttgaatggcgatgtagtggctattgactatagacactattcagcgagtttcaagaaaggtgctaaattactgcataagccaattgtttggcacattaaccaggctacaaccaagacaacgttcaaaccaaacacttggtgtttacgttgtctttggagtacaaagccagtagatacttcaaattcatttgaagttctggcagtagaagacacacaaggaatggacaatcttgcttgtgaaagtcaacaacccacctctgaagaagtagtggaaaatcctaccatacagaaggaagtcatagagtgtgacgtgaaaactaccgaagttgtaggcaatgtcatacttaaaccatcagatgaaggtgttaaagtaacacaagagttaggtcatgaggatcttatggctgcttatgtggaaaacacaagcattaccattaagaaacctaatgagctttcactagccttaggtttaaaaacaattgccactcatggtattgctgcaattaatagtgttccttggagtaaaattttggcttatgtcaaaccattcttaggacaagcagcaattacaacatcaaattgcgctaagagattagcacaacgtgtgtttaacaattatatgccttatgtgtttacattattgttccaattgtgtacttttactaaaagtaccaattctagaattagagcttcactacctacaactattgctaaaaatagtgttaagagtgttgctaaattatgtttggatgccggcattaattatgtgaagtcacccaaattttctaaattgttcacaatcgctatgtggctattgttgttaagtatttgcttaggttctctaatctgtgtaactgctgcttttggtgtactcttatctaattttggtgctccttcttattgtaatggcgttagagaattgtatcttaattcgtctaacgttactactatggatttctgtgaaggttcttttccttgcagcatttgtttaagtggattagactcccttgattcttatccagctcttgaaaccattcaggtgacgatttcatcgtacaagctagacttgacaattttaggtctggccgctgagtgggttttggcatatatgttgttcacaaaattcttttatttattaggtctttcagctataatgcaggtgttctttggctattttgctagtcatttcatcagcaattcttggctcatgtggtttatcattagtattgtacaaatggcacccgtttctgcaatggttaggatgtacatcttctttgcttctttctactacatatggaagagctatgttcatatcatggatggttgcacctcttcgacttgcatgatgtgctataagcgcaatcgtgccacacgcgttgagtgtacaactattgttaatggcatgaagagatctttctatgtctatgcaaatggaggccgtggcttctgcaagactcacaattggaattgtctcaattgtgacacattttgcactggtagtacattcattagtgatgaagttgctcgtgatttgtcactccagtttaaaagaccaatcaaccctactgaccagtcatcgtatattgttgatagtgttgctgtgaaaaatggcgcgcttcacctctactttgacaaggctggtcaaaagacctatgagagacatccgctctcccattttgtcaatttagacaatttgagagctaacaacactaaaggttcactgcctattaatgtcatagtttttgatggcaagtccaaatgcgacgagtctgcttctaagtctgcttctgtgtactacagtcagctgatgtgccaacctattctgttgcttgaccaagctcttgtatcagacgttggagatagtactgaagtttccgttaagatgtttgatgcttatgtcgacaccttttcagcaacttttagtgttcctatggaaaaacttaaggcacttgttgctacagctcacagcgagttagcaaagggtgtagctttagatggtgtcctttctacattcgtgtcagctgcccgacaaggtgttgttgataccgatgttgacacaaaggatgttattgaatgtctcaaactttcacatcactctgacttagaagtgacaggtgacagttgtaacaatttcatgctcacctataataaggttgaaaacatgacgcccagagatcttggcgcatgtattgactgtaatgcaaggcatatcaatgcccaagtagcaaaaagtcacaatgtttcactcatctggaatgtaaaagactacatgtctttatctgaacagctgcgtaaacaaattcgtagtgctgccaagaagaacaacataccttttagactaacttgtgctacaactagacaggttgtcaatgtcataactactaaaatctcactcaagggtggtaagattgttagtacttgttttaaacttatgcttaaggccacattattgtgcgttcttgctgcattggtttgttatatcgttatgccagtacatacattgtcaatccatgatggttacacaaatgaaatcattggttacaaagccattcaggatggtgtcactcgtgacatcatttctactgatgattgttttgcaaataaacatgctggttttgacgcatggtttagccagcgtggtggttcatacaaaaatgacaaaagctgccctgtagtagctgctatcattacaagagagattggtttcatagtgcctggcttaccgggtactgtgctgagagcaatcaatggtgacttcttgcattttctacctcgtgtttttagtgctgttggcaacatttgctacacaccttccaaactcattgagtatagtgattttgctacctctgcttgcgttcttgctgctgagtgtacaatttttaaggatgctatgggcaaacctgtgccatattgttatgacactaatttgctagagggttctatttcttatagtgagcttcgtccagacactcgttatgtgcttatggatggttccatcatacagtttcctaacacttacctggagggttctgttagagtagtaacaacttttgatgctgagtactgtagacatggtacatgcgaaaggtcagaagtaggtatttgcctatctaccagtggtagatgggttcttaataatgagcattacagagctctatcaggagttttctgtggtgttgatgcgatgaatctcatagctaacatctttactcctcttgtgcaacctgtgggtgctttagatgtgtctgcttcagtagtggctggtggtattattgccatattggtgacttgtgctgcctactactttatgaaattcagacgtgtttttggtgagtacaaccatgttgttgctgctaatgcacttttgtttttgatgtctttcactatactctgtctggtaccagcttacagctttctgccgggagtctactcagtcttttacttgtacttgacattctatttcaccaatgatgtttcattcttggctcaccttcaatggtttgccatgttttctcctattgtgcctttttggataacagcaatctatgtattctgtatttctctgaagcactgccattggttctttaacaactatcttaggaaaagagtcatgtttaatggagttacatttagtaccttcgaggaggctgctttgtgtacctttttgctcaacaaggaaatgtacctaaaattgcgtagcgagacactgttgccacttacacagtataacaggtatcttgctctatataacaagtacaagtatttcagtggagccttagatactaccagctatcgtgaagcagcttgctgccacttagcaaaggctctaaatgactttagcaactcaggtgctgatgttctctaccaaccaccacagacatcaatcacttctgctgttctgcagagtggttttaggaaaatggcattcccgtcaggcaaagttgaagggtgcatggtacaagtaacctgtggaactacaactcttaatggattgtggttggatgacacagtatactgtccaagacatgtcatttgcacagcagaagacatgcttaatcctaactatgaagatctgctcattcgcaaatccaaccatagctttcttgttcaggctggcaatgttcaacttcgtgttattggccattctatgcaaaattgtctgcttaggcttaaagttgatacttctaaccctaagacacccaagtataaatttgtccgtatccaacctggtcaaacattttcagttctagcatgctacaatggttcaccatctggtgtttatcagtgtgccatgagacctaatcataccattaaaggttctttccttaatggatcatgtggtagtgttggttttaacattgattatgattgcgtgtctttctgctatatgcatcatatggagcttccaacaggagtacacgctggtactgacttagaaggtaaattctatggtccatttgttgacagacaaactgcacaggctgcaggtacagacacaaccataacattaaatgttttggcatggctgtatgctgctgttatcaatggtgataggtggtttcttaatagattcaccactactttgaatgactttaaccttgtggcaatgaagtacaactatgaacctttgacacaagatcatgttgacatattgggacctctttctgctcaaacaggaattgccgtcttagatatgtgtgctgctttgaaagagctgctgcagaatggtatgaatggtcgtactatccttggtagcactattttagaagatgagtttacaccatttgatgttgttagacaatgctctggtgttaccttccaaggtaagttcaagaaaattgttaagggcactcatcattggatgcttttaactttcttgacatcactattgattcttgttcaaagtacacagtggtcactgtttttctttgtttacgagaatgctttcttgccatttactcttggtattatggcaattgctgcatgtgctatgctgcttgttaagcataagcacgcattcttgtgcttgtttctgttaccttctcttgcaacagttgcttactttaatatggtctacatgcctgctagctgggtgatgcgtatcatgacatggcttgaattggctgacactagcttgtctggttataggcttaaggattgtgttatgtatgcttcagctttagttttgcttattctcatgacagctcgcactgtttatgatgatgctgctagacgtgtttggacactgatgaatgtcattacacttgtttacaaagtctactatggtaatgctttagatcaagctatttccatgtgggccttagttatttctgtaacctctaactattctggtgtcgttacgactatcatgtttttagctagagctatagtgtttgtgtgtgttgagtattacccattgttatttattactggcaacaccttacagtgtatcatgcttgtttattgtttcttaggctattgttgctgctgctactttggccttttctgtttactcaaccgttacttcaggcttactcttggtgtttatgactacttggtctctacacaagaatttaggtatatgaactcccaggggcttttgcctcctaagagtagtattgatgctttcaagcttaacattaagttgttgggtattggaggtaaaccatgtatcaaggttgctactgtacagtctaaaatgtctgacgtaaagtgcacatctgtggtactgctctcggttcttcaacaacttagagtagagtcatcttctaaattgtgggcacaatgtgtacaactccacaatgatattcttcttgcaaaagacacaactgaagctttcgagaagatggtttctcttttgtctgttttgctatccatgcagggtgctgtagacattaataggttgtgcgaggaaatgctcgataaccgtgctactcttcaggctattgcttcagaatttagttctttaccatcatatgccgcttatgccactgcccaggaggcctatgagcaggctgtagctaatggtgattctgaagtcgttctcaaaaagttaaagaaatctttgaatgtggctaaatctgagtttgaccgtgatgctgccatgcaacgcaagttggaaaagatggcagatcaggctatgacccaaatgtacaaacaggcaagatctgaggacaagagggcaaaagtaactagtgctatgcaaacaatgctcttcactatgcttaggaagcttgataatgatgcacttaacaacattatcaacaatgcgcgtgatggttgtgttccactcaacatcataccattgactacagcagccaaactcatggttgttgtccctgattatggtacctacaagaacacttgtgatggtaacacctttacatatgcatctgcactctgggaaatccagcaagttgttgatgcggatagcaagattgttcaacttagtgaaattaacatggacaattcaccaaatttggcttggcctcttattgttacagctctaagagccaactcagctgttaaactacagaataatgaactgagtccagtagcactacgacagatgtcctgtgcggctggtaccacacaaacagcttgtactgatgacaatgcacttgcctactataacaattcgaagggaggtaggtttgtgctggcattactatcagaccaccaagatctcaaatgggctagattccctaagagtgatggtacaggtacaatttacacagaactggaaccaccttgtaggtttgttacagacacaccaaaagggcctaaagtgaaatacttgtacttcatcaaaggcttaaacaacctaaatagaggtatggtgctgggcagtttagctgctacagtacgtcttcaggctggaaatgctacagaagtacctgccaattcaactgtgctttccttctgtgcttttgcagtagaccctgctaaagcatataaggattacctagcaagtggaggacaaccaatcaccaactgtgtgaagatgttgtgtacacacactggtacaggacaggcaattactgtaacaccagaagctaacatggaccaagagtcctttggtggtgcttcatgttgtctgtattgtagatgccacattgaccatccaaatcctaaaggattctgtgacttgaaaggtaagtacgtccaaatacctaccacttgtgctaatgacccagtgggttttacacttagaaacacagtctgtaccgtctgcggaatgtggaaaggttatggctgtagttgtgaccaactccgcgaacccttgatgcagtctgcggatgcatcaacgtttttaaacgggtttgcggtgtaagtgcagcccgtcttacaccgtgcggcacaggcactagtactgatgtcgtctacagggcttttgatatttacaacgaaaaagttgctggttttgcaaagttcctaaaaactaattgctgtcgcttccaggagaaggatgaggaaggcaatttattagactcttactttgtagttaagaggcatactatgtctaactaccaacatgaagagactatttataacttggttaaagattgtccagcggttgctgtccatgactttttcaagtttagagtagatggtgacatggtaccacatatatcacgtcagcgtctaactaaatacacaatggctgatttagtctatgctctacgtcattttgatgagggtaattgtgatacattaaaagaaatactcgtcacatacaattgctgtgatgatgattatttcaataagaaggattggtatgacttcgtagagaatcctgacatcttacgcgtatatgctaacttaggtgagcgtgtacgccaatcattattaaagactgtacaattctgcgatgctatgcgtgatgcaggcattgtaggcgtactgacattagataatcaggatcttaatgggaactggtacgatttcggtgatttcgtacaagtagcaccaggctgcggagttcctattgtggattcatattactcattgctgatgcccatcctcactttgactagggcattggctgctgagtcccatatggatgctgatctcgcaaaaccacttattaagtgggatttgctgaaatatgattttacggaagagagactttgtctcttcgaccgttattttaaatattgggaccagacataccatcccaattgtattaactgtttggatgataggtgtatccttcattgtgcaaactttaatgtgttattttctactgtgtttccacctacaagttttggaccactagtaagaaaaatatttgtagatggtgttccttttgttgtttcaactggataccattttcgtgagttaggagtcgtacataatcaggatgtaaacttacatagctcgcgtctcagtttcaaggaacttttagtgtatgctgctgatccagctatgcatgcagcttctggcaatttattgctagataaacgcactacatgcttttcagtagctgcactaacaaacaatgttgcttttcaaactgtcaaacccggtaattttaataaagacttttatgactttgctgtgtctaaaggtttctttaaggaaggaagttctgttgaactaaaacacttcttctttgctcaggatggcaacgctgctatcagtgattatgactattatcgttataatctgccaacaatgtgtgatatcagacaactcctattcgtagttgaagttgttgataaatactttgattgttacgatggtggctgtattaatgccaaccaagtaatcgttaacaatctggataaatcagctggtttcccatttaataaatggggtaaggctagactttattatgactcaatgagttatgaggatcaagatgcacttttcgcgtatactaagcgtaatgtcatccctactataactcaaatgaatcttaagtatgccattagtgcaaagaatagagctcgcaccgtagctggtgtctctatctgtagtactatgacaaatagacagtttcatcagaaattattgaagtcaatagccgccactagaggagctactgtggtaattggaacaagcaagttttacggtggctggcataatatgttaaaaactgtttacagtgatgtagaaactccacaccttatgggttgggattatccaaaatgtgacagagccatgcctaacatgcttaggataatggcctctcttgttcttgctcgcaaacataacacttgctgtaacttatcacaccgtttctacaggttagctaacgagtgtgcgcaagtattaagtgagatggtcatgtgtggcggctcactatatgttaaaccaggtggaacatcatccggtgatgctacaactgcttatgctaatagtgtctttaacatttgtcaagctgttacagccaatgtaaatgcacttctttcaactgatggtaataagatagctgacaagtatgtccgcaatctacaacacaggctctatgagtgtctctatagaaatagggatgttgatcatgaattcgtggatgagttttacgcttacctgcgtaaacatttctccatgatgattctttctgatgatgccgttgtgtgctataacagtaactatgcggctcaaggtttagtagctagcattaagaactttaaggcagttctttattatcaaaataatgtgttcatgtctgaggcaaaatgttggactgagactgaccttactaaaggacctcacgaattttgctcacagcatacaatgctagttaaacaaggagatgattacgtgtacctgccttacccagatccatcaagaatattaggcgcaggctgttttgtcgatgatattgtcaaaacagatggtacacttatgattgaaaggttcgtgtcactggctattgatgcttacccacttacaaaacatcctaatcaggagtatgctgatgtctttcacttgtatttacaatacattagaaagttacatgatgagcttactggccacatgttggacatgtattccgtaatgctaactaatgataacacctcacggtactgggaacctgagttttatgaggctatgtacacaccacatacagtcttgcaggctgtaggtgcttgtgtattgtgcaattcacagacttcacttcgttgcggtgcctgtattaggagaccattcctatgttgcaagtgctgctatgaccatgtcatttcaacatcacacaaattagtgttgtctgttaatccctatgtttgcaatgccccaggttgtgatgtcactgatgtgacacaactgtatctaggaggtatgagctattattgcaagtcacataagcctcccattagttttccattatgtgctaatggtcaggtttttggtttatacaaaaacacatgtgtaggcagtgacaatgtcactgacttcaatgcgatagcaacatgtgattggactaatgctggcgattacatacttgccaacacttgtactgagagactcaagcttttcgcagcagaaacgctcaaagccactgaggaaacatttaagctgtcatatggtattgccactgtacgcgaagtactctctgacagagaattgcatctttcatgggaggttggaaaacctagaccaccattgaacagaaactatgtctttactggttaccgtgtaactaaaaatagtaaagtacagattggagagtacacctttgaaaaaggtgactatggtgatgctgttgtgtacagaggtactacgacatacaagttgaatgttggtgattactttgtgttgacatctcacactgtaatgccacttagtgcacctactctagtgccacaagagcactatgtgagaattactggcttgtacccaacactcaacatctcagatgagttttctagcaatgttgcaaattatcaaaaggtcggcatgcaaaagtactctacactccaaggaccacctggtactggtaagagtcattttgccatcggacttgctctctattacccatctgctcgcatagtgtatacggcatgctctcatgcagctgttgatgccctatgtgaaaaggcattaaaatatttgcccatagataaatgtagtagaatcatacctgcgcgtgcgcgcgtagagtgttttgataaattcaaagtgaattcaacactagaacagtatgttttctgcactgtaaatgcattgccagaaacaactgctgacattgtagtctttgatgaaatctctatggctactaattatgacttgagtgttgtcaatgctagacttcgtgcaaaacactacgtctatattggcgatcctgctcaattaccagccccccgcacattgctgactaaaggcacactagaaccagaatattttaattcagtgtgcagacttatgaaaacaataggtccagacatgttccttggaacttgtcgccgttgtcctgctgaaattgttgacactgtgagtgctttagtttatgacaataagctaaaagcacacaaggataagtcagctcaatgcttcaaaatgttctacaaaggtgttattacacatgatgtttcatctgcaatcaacagacctcaaataggcgttgtaagagaatttcttacacgcaatcctgcttggagaaaagctgtttttatctcaccttataattcacagaacgctgtagcttcaaaaatcttaggattgcctacgcagactgttgattcatcacagggttctgaatatgactatgtcatattcacacaaactactgaaacagcacactcttgtaatgtcaaccgcttcaatgtggctatcacaagggcaaaaattggcattttgtgcataatgtctgatagagatctttatgacaaactgcaatttacaagtctagaaataccacgtcgcaatgtggctacattacaagcagaaaatgtaactggactttttaaggactgtagtaagatcattactggtcttcatcctacacaggcacctacacacctcagcgttgatataaagttcaagactgaaggattatgtgttgacataccaggcataccaaaggacatgacctaccgtagactcatctctatgatgggtttcaaaatgaattaccaagtcaatggttaccctaatatgtttatcacccgcgaagaagctattcgtcacgttcgtgcgtggattggctttgatgtagagggctgtcatgcaactagagatgctgtgggtactaacctacctctccagctaggattttctacaggtgttaacttagtagctgtaccgactggttatgttgacactgaaaataacacagaattcaccagagttaatgcaaaacctccaccaggtgaccagtttaaacatcttataccactcatgtataaaggcttgccctggaatgtagtgcgtattaagatagtacaaatgctcagtgatacactgaaaggattgtcagacagagtcgtgttcgtcctttgggcgcatggctttgagcttacatcaatgaagtactttgtcaagattggacctgaaagaacgtgttgtctgtgtgacaaacgtgcaacttgcttttctacttcatcagatacttatgcctgctggaatcattctgtgggttttgactatgtctataacccatttatgattgatgttcagcagtggggctttacgggtaaccttcagagtaaccatgaccaacattgccaggtacatggaaatgcacatgtggctagttgtgatgctatcatgactagatgtttagcagtccatgagtgctttgttaagcgcgttgattggtctgttgaataccctattataggagatgaactgagggttaattctgcttgcagaaaagtacaacacatggttgtgaagtctgcattgcttgctgataagtttccagttcttcatgacataggaaatccaaaggctatcaagtgtgtgcctcaggctgaagtagaatggaagttctacgatgctcagccatgtagtgacaaagcttacaaaatagaggaactcttctattcttatgctatacatcacgataaattcactgatggtgtttgtttgttttggaattgtaacgttgatcgttacccagccaatgcaattgtgtgtaggtttgacacaagagtcttgtcaaacttgaacttaccaggctgtgatggtggtagtttgtatgtgaataagcatgcattccacactccagctttcgataaaagtgcatttactaatttaaagcaattgcctttcttttactattctgatagtccttgtgagtctcatggcaaacaagtagtgtcggatattgattatgttccactcaaatctgctacgtgtattacacgatgcaatttaggtggtgctgtttgcagacaccatgcaaatgagtaccgacagtacttggatgcatataatatgatgatttctgctggatttagcctatggatttacaaacaatttgatacttataacctgtggaatacatttaccaggttacagagtttagaaaatgtggcttataatgttgttaataaaggacactttgatggacacgccggcgaagcacctgtttccatcattaataatgctgtttacacaaaggtagatggtattgatgtggagatctttgaaaataagacaacacttcctgttaatgttgcatttgagctttgggctaagcgtaacattaaaccagtgccagagattaagatactcaataatttgggtgttgatatcgctgctaatactgtaatctgggactacaaaagagaagccccagcacatgtatctacaataggtgtctgcacaatgactgacattgccaagaaacctactgagagtgcttgttcttcacttactgtcttgtttgatggtagagtggaaggacaggtagacctttttagaaacgcccgtaatggtgttttaataacagaaggttcagtcaaaggtctaacaccttcaaagggaccagcacaagctagcgtcaatggagtcacattaattggagaatcagtaaaaacacagtttaactactttaagaaagtagacggcattattcaacagttgcctgaaacctactttactcagagcagagacttagaggattttaagcccagatcacaaatggaaactgactttctcgagctcgctatggatgaattcatacagcgatataagctcgagggctatgccttcgaacacatcgtttatggagatttcagtcatggacaacttggcggtcttcatttaatgataggcttagccaagcgctcacaagattcaccacttaaattagaggattttatccctatggacagcacagtgaaaaattacttcataacagatgcgcaaacaggttcatcaaaatgtgtgtgttctgtgattgatcttttacttgatgactttgtcgagataataaagtcacaagatttgtcagtgatttcaaaagtggtcaaggttacaattgactatgctgaaatttcattcatgctttggtgtaaggatggacatgttgaaaccttctacccaaaactacaagcaagtcaagcgtggcaaccaggtgttgcgatgcctaacttgtacaagatgcaaagaatgcttcttgaaaagtgtgaccttcagaattatggtgaaaatgctgttataccaaaaggaataatgatgaatgtcgcaaagtatactcaactgtgtcaatacttaaatacacttactttagctgtaccctacaacatgagagttattcactttggtgctggctctgataaaggagttgcaccaggtacagctgtgctcagacaatggttgccaactggcacactacttgtcgattcagatcttaatgacttcgtctccgacgcagattctactttaattggagactgtgcaacagtacatacggctaataaatgggaccttattattagcgatatgtatgaccctaggaccaaacatgtgacaaaagagaatgactctaaagaagggtttttcacttatctgtgtggatttataaagcaaaaactagccctgggtggttctatagctgtaaagataacagagcattcttggaatgctgacctttacaagcttatgggccatttctcatggtggacagcttttgttacaaatgtaaatgcatcatcatcggaagcatttttaattggggctaactatcttggcaagccgaaggaacaaattgatggctataccatgcatgctaactacattttctggaggaacacaaatcctatccagttgtcttcctattcactctttgacatgagcaaatttcctcttaaattaagaggaactgctgtaatgtctcttaaggagaatcaaatcaatgatatgatttattctcttctggaaaaaggtaggcttatcattagagaaaacaacagagttgtggtttcaagtgatattcttgttaacaactaaacgaacatgtttattttcttattatttcttactctcactagtggtagtgaccttgaccggtgcaccacttttgatgatgttcaagctcctaattacactcaacatacttcatctatgaggggggtttactatcctgatgaaatttttagatcagacactctttatttaactcaggatttatttcttccattttattctaatgttacagggtttcatactattaatcatacgtttggcaaccctgtcataccttttaaggatggtatttattttgctgccacagagaaatcaaatgttgtccgtggttgggtttttggttctaccatgaacaacaagtcacagtcggtgattattattaacaattctactaatgttgttatacgagcatgtaactttgaattgtgtgacaaccctttctttgctgtttctaaacccatgggtacacagacacatactatgatattcgataatgcatttaattgcactttcgagtacatatctgatgccttttcgcttgatgtttcagaaaagtcaggtaattttaaacacttacgagagtttgtgtttaaaaataaagatgggtttctctatgtttataagggctatcaacctatagatgtagttcgtgatctaccttctggttttaacactttgaaacctatttttaagttgcctcttggtattaacattacaaattttagagccattcttacagccttttcacctgctcaagacatttggggcacgtcagctgcagcctattttgttggctatttaaagccaactacatttatgctcaagtatgatgaaaatggtacaatcacagatgctgttgattgttctcaaaatccacttgctgaactcaaatgctctgttaagagctttgagattgacaaaggaatttaccagacctctaatttcagggttgttccctcaggagatgttgtgagattccctaatattacaaacttgtgtccttttggagaggtttttaatgctactaaattcccttctgtctatgcatgggagagaaaaaaaatttctaattgtgttgctgattactctgtgctctacaactcaacatttttttcaacctttaagtgctatggcgtttctgccactaagttgaatgatctttgcttctccaatgtctatgcagattcttttgtagtcaagggagatgatgtaagacaaatagcgccaggacaaactggtgttattgctgattataattataaattgccagatgatttcatgggttgtgtccttgcttggaatactaggaacattgatgctacttcaactggtaattataattataaatataggtatcttagacatggcaagcttaggccctttgagagagacatatctaatgtgcctttctcccctgatggcaaaccttgcaccccacctgctcttaattgttattggccattaaatgattatggtttttacaccactactggcattggctaccaaccttacagagttgtagtactttcttttgaacttttaaatgcaccggccacggtttgtggaccaaaattatccactgaccttattaagaaccagtgtgtcaattttaattttaatggactcactggtactggtgtgttaactccttcttcaaagagatttcaaccatttcaacaatttggccgtgatgtttctgatttcactgattccgttcgagatcctaaaacatctgaaatattagacatttcaccttgctcttttgggggtgtaagtgtaattacacctggaacaaatgcttcatctgaagttgctgttctatatcaagatgttaactgcactgatgtttctacagcaattcatgcagatcaactcacaccagcttggcgcatatattctactggaaacaatgtattccagactcaagcaggctgtcttataggagctgagcatgtcgacacttcttatgagtgcgacattcctattggagctggcatttgtgctagttaccatacagtttctttattacgtagtactagccaaaaatctattgtggcttatactatgtctttaggtgctgatagttcaattgcttactctaataacaccattgctatacctactaacttttcaattagcattactacagaagtaatgcctgtttctatggctaaaacctccgtagattgtaatatgtacatctgcggagattctactgaatgtgctaatttgcttctccaatatggtagcttttgcacacaactaaatcgtgcactctcaggtattgctgctgaacaggatcgcaacacacgtgaagtgttcgctcaagttaaacaaatgtacaaaaccccaactttgaaatattttggtggttttaatttttcacaaatattacctgaccctctaaagccaactaagaggtcttttattgaggacttgctctttaataaggtgacactcgctgatgctggcttcatgaagcaatatggcgaatgcctaggtgatattaatgctagagatctcatttgtgcgcagaagttcaatggacttacagtgttgccacctctgctcactgatgatatgattgctgcctacactgctgctctagttagtggtactgccactgctggatggacatttggtgctggcgctgctcttcaaataccttttgctatgcaaatggcatataggttcaatggcattggagttacccaaaatgttctctatgagaaccaaaaacaaatcgccaaccaatttaacaaggcgattagtcaaattcaagaatcacttacaacaacatcaactgcattgggcaagctgcaagacgttgttaaccagaatgctcaagcattaaacacacttgttaaacaacttagctctaattttggtgcaatttcaagtgtgctaaatgatatcctttcgcgacttgataaagtcgaggcggaggtacaaattgacaggttaattacaggcagacttcaaagccttcaaacctatgtaacacaacaactaatcagggctgctgaaatcagggcttctgctaatcttgctgctactaaaatgtctgagtgtgttcttggacaatcaaaaagagttgacttttgtggaaagggctaccaccttatgtccttcccacaagcagccccgcatggtgttgtcttcctacatgtcacgtatgtgccatcccaggagaggaacttcaccacagcgccagcaatttgtcatgaaggcaaagcatacttccctcgtgaaggtgtttttgtgtttaatggcacttcttggtttattacacagaggaacttcttttctccacaaataattactacagacaatacatttgtctcaggaaattgtgatgtcgttattggcatcattaacaacacagtttatgatcctctgcaacctgagcttgactcattcaaagaagagctggacaagtacttcaaaaatcatacatcaccagatgttgatcttggcgacatttcaggcattaacgcttctgtcgtcaacattcaaaaagaaattgaccgcctcaatgaggtcgctaaaaatttaaatgaatcactcattgaccttcaagaattgggaaaatatgagcaatatattaaatggccttggtatgtttggctcggcttcattgctggactaattgccatcgtcatggttacaatcttgctttgttgcatgactagttgttgcagttgcctcaagggtgcatgctcttgtggttcttgctgcaagtttgatgaggatgactctgagccagttctcaagggtgtcaaattacattacacataaacgaacttatggatttgtttatgagattttttactcttggatcaattactgcacagccagtaaaaattgacaatgcttctcctgcaagtactgttcatgctacagcaacgataccgctacaagcctcactccctttcggatggcttgttattggcgttgcatttcttgctgtttttcagagcgctaccaaaataattgcgctcaataaaagatggcagctagccctttataagggcttccagttcatttgcaatttactgctgctatttgttaccatctattcacatcttttgcttgtcgctgcaggtatggaggcgcaatttttgtacctctatgccttgatatattttctacaatgcatcaacgcatgtagaattattatgagatgttggctttgttggaagtgcaaatccaagaacccattactttatgatgccaactactttgtttgctggcacacacataactatgactactgtataccatataacagtgtcacagatacaattgtcgttactgaaggtgacggcatttcaacaccaaaactcaaagaagactaccaaattggtggttattctgaggataggcactcaggtgttaaagactatgtcgttgtacatggctatttcaccgaagtttactaccagcttgagtctacacaaattactacagacactggtattgaaaatgctacattcttcatctttaacaagcttgttaaagacccaccgaatgtgcaaatacacacaatcgacggctcttcaggagttgctaatccagcaatggatccaatttatgatgagccgacgacgactactagcgtgcctttgtaagcacaagaaagtgagtacgaacttatgtactcattcgtttcggaagaaacaggtacgttaatagttaatagcgtacttctttttcttgctttcgtggtattcttgctagtcacactagccatccttactgcgcttcgattgtgtgcgtactgctgcaatattgttaacgtgagtttagtaaaaccaacggtttacgtctactcgcgtgttaaaaatctgaactcttctgaaggagttcctgatcttctggtctaaacgaactaactattattattattctgtttggaactttaacattgcttatcatggcagacaacggtactattaccgttgaggagcttaaacaactcctggaacaatggaacctagtaataggtttcctattcctagcctggattatgttactacaatttgcctattctaatcggaacaggtttttgtacataataaagcttgttttcctctggctcttgtggccagtaacacttgcttgttttgtgcttgctgctgtctacagaattaattgggtgactggcgggattgcgattgcaatggcttgtattgtaggcttgatgtggcttagctacttcgttgcttccttcaggctgtttgctcgtacccgctcaatgtggtcattcaacccagaaacaaacattcttctcaatgtgcctctccgggggacaattgtgaccagaccgctcatggaaagtgaacttgtcattggtgctgtgatcattcgtggtcacttgcgaatggccggacactccctagggcgctgtgacattaaggacctgccaaaagagatcactgtggctacatcacgaacgctttcttattacaaattaggagcgtcgcagcgtgtaggcactgattcaggttttgctgcatacaaccgctaccgtattggaaactataaattaaatacagaccacgccggtagcaacgacaatattgctttgctagtacagtaagtgacaacagatgtttcatcttgttgacttccaggttacaatagcagagatattgattatcattatgaggactttcaggattgctatttggaatcttgacgttataataagttcaatagtgagacaattatttaagcctctaactaagaagaattattcggagttagatgatgaagaacctatggagttagattatccataaaacgaacatgaaaattattctcttcctgacattgattgtatttacatcttgcgagctatatcactatcaggagtgtgttagaggtacgactgtactactaaaagaaccttgcccatcaggaacatacgagggcaattcaccatttcaccctcttgctgacaataaatttgcactaacttgcactagcacacactttgcttttgcttgtgctgacggtactcgacatacctatcagctgcgtgcaagatcagtttcaccaaaacttttcatcagacaagaggaggttcaacaagagctctactcgccactttttctcattgttgctgctctagtatttttaatactttgcttcaccattaagagaaagacagaatgaatgagctcactttaattgacttctatttgtgctttttagcctttctgctattccttgttttaataatgcttattatattttggttttcactcgaaatccaggatctagaagaaccttgtaccaaagtctaaacgaacatgaaacttctcattgttttgacttgtatttctctatgcagttgcatatgcactgtagtacagcgctgtgcatctaataaacctcatgtgcttgaagatccttgtaaggtacaacactaggggtaatacttatagcactgcttggctttgtgctctaggaaaggttttaccttttcatagatggcacactatggttcaaacatgcacacctaatgttactatcaactgtcaagatccagctggtggtgcgcttatagctaggtgttggtaccttcatgaaggtcaccaaactgctgcatttagagacgtacttgttgttttaaataaacgaacaaattaaaatgtctgataatggaccccaatcaaaccaacgtagtgccccccgcattacatttggtggacccacagattcaactgacaataaccagaatggaggacgcaatggggcaaggccaaaacagcgccgaccccaaggtttacccaataatattgcgtcttggttcacagctctcactcagcatggcaaggaggaacttagattccctcgaggccagggcgttccaatcaacaccaatagtggtccagatgaccaaattggctactaccgaagagctacccgacgagttcgtggtggtgacggcaaaatgaaagagctcagccccagatggtacttctattacctaggaactggcccagaagcttcacttccctacggcgctaacaaagaaggcatcgtatgggttgcaactgagggagccttgaatacacccaaagaccacattggcacccgcaatcctaataacaatgctgccaccgtgctacaacttcctcaaggaacaacattgccaaaaggcttctacgcagagggaagcagaggcggcagtcaagcctcttctcgctcctcatcacgtagtcgcggtaattcaagaaattcaactcctggcagcagtaggggaaattctcctgctcgaatggctagcggaggtggtgaaactgccctcgcgctattgctgctagacagattgaaccagcttgagagcaaagtttctggtaaaggccaacaacaacaaggccaaactgtcactaagaaatctgctgctgaggcatctaaaaagcctcgccaaaaacgtactgccacaaaacagtacaacgtcactcaagcatttgggagacgtggtccagaacaaacccaaggaaatttcggggaccaagacctaatcagacaaggaactgattacaaacattggccgcaaattgcacaatttgctccaagtgcctctgcattctttggaatgtcacgcattggcatggaagtcacaccttcgggaacatggctgacttatcatggagccattaaattggatgacaaagatccacaattcaaagacaacgtcatactgctgaacaagcacattgacgcatacaaaacattcccaccaacagagcctaaaaaggacaaaaagaaaaagactgatgaagctcagcctttgccgcagagacaaaagaagcagcccactgtgactcttcttcctgcggctgacatggatgatttctccagacaacttcaaaattccatgagtggagcttctgctgattcaactcaggcataaacactcatgatgaccacacaaggcagatgggctatgtaaacgttttcgcaattccgtttacgatacatagtctactcttgtgcagaatgaattctcgtaactaaacagcacaagtaggtttagttaactttaatctcacatagcaatctttaatcaatgtgtaacattagggaggacttgaaagagccaccacattttcatcgaggccacgcggagtacgatcgagggtacagtgaataatgctagggagagctgcctatatggaagagccctaatgtgtaaaattaattttagtagtgctatccccatgtgattttaatagcttcttaggagaatgac

SEQ ID NO: 29780 - DNA, 29727 bp, SARS Coronavirus
atattaggtttttacctacccaggaaaagccaaccaacctcgatctcttgtagatctgttctctaaacgaactttaaaatctgtgtagctgtcgctcggctgcatgcctagtgcacctacgcagtataaacaataataaattttactgtcgttgacaagaaacgagtaactcgtccctcttctgcagactgcttacggtttcgtccgtgttgcagtcgatcatcagcatacctaggtttcgtccgggtgtgaccgaaaggtaagatggagagccttgttcttggtgtcaacgagaaaacacacgtccaactcagtttgcctgtccttcaggttagagacgtgctagtgcgtggcttcggggactctgtggaagaggccctatcggaggcacgtgaacacctcaaaaatggcacttgtggtctagtagagctggaaaaaggcgtactgccccagcttgaacagccctatgtgttcattaaacgttctgatgccttaagcaccaatcacggccacaaggtcgttgagctggttgcagaaatggacggcattcagtacggtcgtagcggtataacactgggagtactcgtgccacatgtgggcgaaaccccaattgcataccgcaatgttcttcttcgtaagaacggtaataagggagccggtggtcatagctatggcatcgatctaaagtcttatgacttaggtgacgagcttggcactgatcccattgaagattatgaacaaaactggaacactaagcatggcagtggtgcactccgtgaactcactcgtgagctcaatggaggtgcagtcactcgctatgtcgacaacaatttctgtggcccagatgggtaccctcttgattgcatcaaagattttctcgcacgcgcgggcaagtcaatgtgcactctttccgaacaacttgattacatcgagtcgaagagaggtgtctactgctgccgtgaccatgagcatgaaattgcctggttcactgagcgctctgataagagctacgagcaccagacacccttcgaaattaagagtgccaagaaatttgacactttcaaaggggaatgcccaaagtttgtgtttcctcttaactcaaaagtcaaagtcattcaaccacgtgttgaaaagaaaaagactgagggtttcatggggcgtatacgctctgtgtaccctgttgcatctccacaggagtgtaacaatatgcacttgtctaccttgatgaaatgtaatcattgcgatgaagtttcatggcagacgtgcgactttctgaaagccacttgtgaacattgtggcactgaaaatttagttattgaaggacctactacatgtgggtacctacctactaatgctgtagtgaaaatgccatgtcctgcctgtcaagacccagagattggacctgagcatagtgttgcagattatcacaaccactcaaacattgaaactcgactccgcaagggaggtaggactagatgttttggaggctgtgtgtttgcctatgttggctgctataataagcgtgcctactgggttcctcgtgctagtgctgatattggctcaggccatactggcattactggtgacaatgtggagaccttgaatgaggatctccttgagatactgagtcgtgaacgtgttaacattaacattgttggcgattttcatttgaatgaagaggttgccatcattttggcatctttctctgcttctacaagtgcctttattgacactataaagagtcttgattacaagtctttcaaaaccattgttgagtcctgtggtaactataaagttaccaagggaaagcccgtaaaaggtgcttggaacattggacaacagagatcagttttaacaccactgtgtggttttccctcacaggctgctggtgttatcagatcaatttttgcgcgcacacttgatgcagcaaaccactcaattcctgatttgcaaagagcagctgtcaccatacttgatggtatttctgaacagtcattacgtcttgtcgacgccatggtttatacttcagacctgctcaccaacagtgtcattattatggcatatgtaactggtggtcttgtacaacagacttctcagtggttgtctaatcttttgggcactactgttgaaaaactcaggcctatctttgaatggattgaggcgaaacttagtgcaggagttgaatttctcaaggatgcttgggagattctcaaatttctcattacaggtgtttttgacatcgtcaagggtcaaatacaggttgcttcagataacatcaaggattgtgtaaaatgcttcattgatgttgttaacaaggcactcgaaatgtgcattgatcaagtcactatcgctggcgcaaagttgcgatcactcaacttaggtgaagtcttcatcgctcaaagcaagggactttaccgtcagtgtatacgtggcaaggagcagctgcaactactcatgcctcttaaggcaccaaaagaagtaacctttcttgaaggtgattcacatgacacagtacttacctctgaggaggttgttctcaagaacggtgaactcgaagcactcgagacgcccgttgatagcttcacaaatggagctatcgttggcacaccagtctgtgtaaatggcctcatgctcttagagattaaggacaaagaacaatactgcgcattgtctcctggtttactggctacaaacaatgtctttcgcttaaaagggggtgcaccaattaaaggtgtaacctttggagaagatactgtttgggaagttcaaggttacaagaatgtgagaatcacatttgagcttgatgaacgtgttgacaaagtgcttaatgaaaagtgctctgtctacactgttgaatccggtaccgaagttactgagtttgcatgtgttgtagcagaggctgttgtgaagactttacaaccagtttctgatctccttaccaacatgggtattgatcttgatgagtggagtgtagctacattctacttatttgatgatgctggtgaagaaaacttttcatcacgtatgtattgttccttttaccctccagatgaggaagaagaggacgatgcagagtgtgaggaagaagaaattgatgaaacctgtgaacatgagtacggtacagaggatgattatcaaggtctccctctggaatttggtgcctcagctgaaacagttcgagttgaggaagaagaagaggaagactggctggatgatactactgagcaatcagagattgagccagaaccagaacctacacctgaagaaccagttaatcagtttactggttatttaaaacttactgacaatgttgccattaaatgtgttgacatcgttaaggaggcacaaagtgctaatcctatggtgattgtaaatgctgctaacatacacctgaaacatggtggtggtgtagcaggtgcactcaacaaggcaaccaatggtgccatgcaaaaggagagtgatgattacattaagctaaatggccctcttacagtaggagggtcttgtttgctttctggacataatcttgctaagaagtgtctgcatgttgttggacctaacctaaatgcaggtgaggacatccagcttcttaaggcagcatatgaaaatttcaattcacaggacatcttacttgcaccattgttgtcagcaggcatatttggtgctaaaccacttcagtctttacaagtgtgcgtgcagacggttcgtacacaggtttatattgcagtcaatgacaaagctctttatgagcaggttgtcatggattatcttgataacctgaagcctagagtggaagcacctaaacaagaggagccaccaaacacagaagattccaaaactgaggagaaatccgtcgtacagaagcctgtcgatgtgaagccaaaaattaaggcctgcattgatgaggttaccacaacactggaagaaactaagtttcttaccaataagttactcttgtttgctgatatcaatggtaagctttaccatgattctcagaacatgcttagaggtgaagatatgtctttccttgagaaggatgcaccttacatggtaggtgatgttatcactagtggtgatatcacttgtgttgtaataccctccaaaaaggctggtggcactactgagatgctctcaagagctttgaagaaagtgccagttgatgagtatataaccacgtaccctggacaaggatgtgctggttatacacttgaggaagctaagactgctcttaagaaatgcaaatctgcattttatgtactaccttcagaagcacctaatgctaaggaagagattctaggaactgtatcctggaatttgagagaaatgcttgctcatgctgaagagacaagaaaattaatgcctatatgcatggatgttagagccataatggcaaccatccaacgtaagtataaaggaattaaaattcaagagggcatcgttgactatggtgtccgattcttcttttatactagtaaagagcctgtagcttctattattacgaagctgaactctctaaatgagccgcttgtcacaatgccaattggttatgtgacacatggttttaatcttgaagaggctgcgcgctgtatgcgttctcttaaagctcctgccgtagtgtcagtatcatcaccagatgctgttactacatataatggatacctcacttcgtcatcaaagacatctgaggagcactttgtagaaacagtttctttggctggctcttacagagattggtcctattcaggacagcgtacagagttaggtgttgaatttcttaagcgtggtgacaaaattgtgtaccacactctggagagccccgtcgagtttcatcttgacggtgaggttctttcacttgacaaactaaagagtctcttatccctgcgggaggttaagactataaaagtgttcacaactgtggacaacactaatctccacacacagcttgtggatatgtctatgacatatggacagcagtttggtccaacatacttggatggtgctgatgttacaaaaattaaacctcatgtaaatcatgagggtaagactttctttgtactacctagtgatgacacactacgtagtgaagctttcgagtactaccatactcttgatgagagttttcttggtaggtacatgtctgctttaaaccacacaaagaaatggaaatttcctcaagttggtggtttaacttcaattaaatgggctgataacaattgttatttgtctagtgttttattagcacttcaacagcttgaagtcaaattcaatgcaccagcacttcaagaggcttattatagagcccgtgctggtgatgctgctaacttttgtgcactcatactcgcttacagtaataaaactgttggcgagcttggtgatgtcagagaaactatgacccatcttctacagcatgctaatttggaatctgcaaagcgagttcttaatgtggtgtgtaaacattgtggtcagaaaactactaccttaacgggtgtagaagctgtgatgtatatgggtactctatcttatgataatcttaagacaggtgtttccattccatgtgtgtgtggtcgtgatgctacacaatatctagtacaacaagagtcttcttttgttatgatgtctgcaccacctgctgagtataaattacagcaaggtacattcttatgtgcgaatgagtacactggtaactatcagtgtggtcattacactcatataactgctaaggagaccctctatcgtattgacggagctcaccttacaaagatgtcagagtacaaaggaccagtgactgatgttttctacaaggaaacatcttacactacaaccatcaagcctgtgtcgtataaactcgatggagttacttacacagagattgaaccaaaattggatgggtattataaaaaggataatgcttactatacagagcagcctatagaccttgtaccaactcaaccattaccaaatgcgagttttgataatttcaaactcacatgttctaacacaaaatttgctgatgatttaaatcaaatgacaggcttcacaaagccagcttcacgagagctatctgtcacattcttcccagacttgaatggcgatgtagtggctattgactatagacactattcagcgagtttcaagaaaggtgctaaattactgcataagccaattgtttggcacattaaccaggctacaaccaagacaacgttcaaaccaaacacttggtgtttacgttgtctttggagtacaaagccagtagatacttcaaattcatttgaagttctggcagtagaagacacacaaggaatggacaatcttgcttgtgaaagtcaacaacccacctctgaagaagtagtggaaaatcctaccatacagaaggaagtcatagagtgtgacgtgaaaactaccgaagttgtaggcaatgtcatacttaaaccatcagatgaaggtgttaaagtaacacaagagttaggtcatgaggatcttatggctgcttatgtggaaaacacaagcattaccattaagaaacctaatgagctttcactagccttaggtttaaaaacaattgccactcatggtattgctgcaattaatagtgttccttggagtaaaattttggcttatgtcaaaccattcttaggacaagcagcaattacaacatcaaattgcgctaagagattagcacaacgtgtgtttaacaattatatgccttatgtgtttacattattgttccaattgtgtacttttactaaaagtaccaattctagaattagagcttcactacctacaactattgctaaaaatagtgttaagagtgttgctaaattatgtttggatgccggcattaattatgtgaagtcacccaaattttctaaattgttcacaatcgctatgtggctattgttgttaagtatttgcttaggttctctaatctgtgtaactgctgcttttggtgtactcttatctaattttggtgctccttcttattgtaatggcgttagagaattgtatcttaattcgtctaacgttactactatggatttctgtgaaggttcttttccttgcagcatttgtttaagtggattagactcccttgattcttatccagctcttgaaaccattcaggtgacgatttcatcgtacaagctagacttgacaattttaggtctggccgctgagtgggttttggcatatatgttgttcacaaaattcttttatttattaggtctttcagctataatgcaggtgttctttggctattttgctagtcatttcatcagcaattcttggctcatgtggtttatcattagtattgtacaaatggcacccgtttctgcaatggttaggatgtacatcttctttgcttctttctactacatatggaagagctatgttcatatcatggatggttgcacctcttcgacttgcatgatgtgctataagcgcaatcgtgccacacgcgttgagtgtacaactattgttaatggcatgaagagatctttctatgtctatgcaaatggaggccgtggcttctgcaagactcacaattggaattgtctcaattgtgacacattttgcactggtagtacattcattagtgatgaagttgctcgtgatttgtcactccagtttaaaagaccaatcaaccctactgaccagtcatcgtatattgttgatagtgttgctgtgaaaaatggcgcgcttcacctctactttgacaaggctggtcaaaagacctatgagagacatccgctctcccattttgtcaatttagacaatttgagagctaacaacactaaaggttcactgcctattaatgtcatagtttttgatggcaagtccaaatgcgacgagtctgcttctaagtctgcttctgtgtactacagtcagctgatgtgccaacctattctgttgcttgaccaagctcttgtatcagacgttggagatagtactgaagtttccgttaagatgtttgatgcttatgtcgacaccttttcagcaacttttagtgttcctatggaaaaacttaaggcacttgttgctacagctcacagcgagttagcaaagggtgtagctttagatggtgtcctttctacattcgtgtcagctgcccgacaaggtgttgttgataccgatgttgacacaaaggatgttattgaatgtctcaaactttcacatcactctgacttagaagtgacaggtgacagttgtaacaatttcatgctcacctataataaggttgaaaacatgacgcccagagatcttggcgcatgtattgactgtaatgcaaggcatatcaatgcccaagtagcaaaaagtcacaatgtttcactcatctggaatgtaaaagactacatgtctttatctgaacagctgcgtaaacaaattcgtagtgctgccaagaagaacaacataccttttagactaacttgtgctacaactagacaggttgtcaatgtcataactactaaaatctcactcaagggtggtaagattgttagtacttgttttaaacttatgcttaaggccacattattgtgcgttcttgctgcattggtttgttatatcgttatgccagtacatacattgtcaatccatgatggttacacaaatgaaatcattggttacaaagccattcaggatggtgtcactcgtgacatcatttctactgatgattgttttgcaaataaacatgctggttttgacgcatggtttagccagcgtggtggttcatacaaaaatgacaaaagctgccctgtagtagctgctatcattacaagagagattggtttcatagtgcctggcttaccgggtactgtgctgagagcaatcaatggtgacttcttgcattttctacctcgtgtttttagtgctgttggcaacatttgctacacaccttccaaactcattgagtatagtgattttgctacctctgcttgcgttcttgctgctgagtgtacaatttttaaggatgctatgggcaaacctgtgccatattgttatgacactaatttgctagagggttctatttcttatagtgagcttcgtccagacactcgttatgtgcttatggatggttccatcatacagtttcctaacacttacctggagggttctgttagagtagtaacaacttttgatgctgagtactgtagacatggtacatgcgaaaggtcagaagtaggtatttgcctatctaccagtggtagatgggttcttaataatgagcattacagagctctatcaggagttttctgtggtgttgatgcgatgaatctcatagctaacatctttactcctcttgtgcaacctgtgggtgctttagatgtgtctgcttcagtagtggctggtggtattattgccatattggtgacttgtgctgcctactactttatgaaattcagacgtgtttttggtgagtacaaccatgttgttgctgctaatgcacttttgtttttgatgtctttcactatactctgtctggtaccagcttacagctttctgccgggagtctactcagtcttttacttgtacttgacattctatttcaccaatgatgtttcattcttggctcaccttcaatggtttgccatgttttctcctattgtgcctttttggataacagcaatctatgtattctgtatttctctgaagcactgccattggttctttaacaactatcttaggaaaagagtcatgtttaatggagttacatttagtaccttcgaggaggctgctttgtgtacctttttgctcaacaaggaaatgtacctaaaattgcgtagcgagacactgttgccacttacacagtataacaggtatcttgctctatataacaagtacaagtatttcagtggagccttagatactaccagctatcgtgaagcagcttgctgccacttagcaaaggctctaaatgactttagcaactcaggtgctgatgttctctaccaaccaccacagacatcaatcacttctgctgttctgcagagtggttttaggaaaatggcattcccgtcaggcaaagttgaagggtgcatggtacaagtaacctgtggaactacaactcttaatggattgtggttggatgacacagtatactgtccaagacatgtcatttgcacagcagaagacatgcttaatcctaactatgaagatctgctcattcgcaaatccaaccatagctttcttgttcaggctggcaatgttcaacttcgtgttattggccattctatgcaaaattgtctgcttaggcttaaagttgatacttctaaccctaagacacccaagtataaatttgtccgtatccaacctggtcaaacattttcagttctagcatgctacaatggttcaccatctggtgtttatcagtgtgccatgagacctaatcataccattaaaggttctttccttaatggatcatgtggtagtgttggttttaacattgattatgattgcgtgtctttctgctatatgcatcatatggagcttccaacaggagtacacgctggtactgacttagaaggtaaattctatggtccatttgttgacagacaaactgcacaggctgcaggtacagacacaaccataacattaaatgttttggcatggctgtatgctgctgttatcaatggtgataggtggtttcttaatagattcaccactactttgaatgactttaaccttgtggcaatgaagtacaactatgaacctttgacacaagatcatgttgacatattgggacctctttctgctcaaacaggaattgccgtcttagatatgtgtgctgctttgaaagagctgctgcagaatggtatgaatggtcgtactatccttggtagcactattttagaagatgagtttacaccatttgatgttgttagacaatgctctggtgttaccttccaaggtaagttcaagaaaattgttaagggcactcatcattggatgcttttaactttcttgacatcactattgattcttgttcaaagtacacagtggtcactgtttttctttgtttacgagaatgctttcttgccatttactcttggtattatggcaattgctgcatgtgctatgctgcttgttaagcataagcacgcattcttgtgcttgtttctgttaccttctcttgcaacagttgcttactttaatatggtctacatgcctgctagctgggtgatgcgtatcatgacatggcttgaattggctgacactagcttgtctggttataggcttaaggattgtgttatgtatgcttcagctttagttttgcttattctcatgacagctcgcactgtttatgatgatgctgctagacgtgtttggacactgatgaatgtcattacacttgtttacaaagtctactatggtaatgctttagatcaagctatttccatgtgggccttagttatttctgtaacctctaactattctggtgtcgttacgactatcatgtttttagctagagctatagtgtttgtgtgtgttgagtattatccattgttatttattactggcaacaccttacagtgtatcatgcttgtttattgtttcttaggctattgttgctgctgctactttggccttttctgtttactcaaccgttacttcaggcttactcttggtgtttatgactacttggtctctacacaagaatttaggtatatgaactcccaggggcttttgcctcctaagagtagtattgatgctttcaagcttaacattaagttgttgggtattggaggtaaaccatgtatcaaggttgctactgtacagtctaaaatgtctgacgtaaagtgcacatctgtggtactgctctcggttcttcaacaacttagagtagagtcatcttctaaattgtgggcacaatgtgtacaactccacaatgatattcttcttgcaaaagacacaactgaagctttcgagaagatggtttctcttttgtctgttttgctatccatgcagggtgctgtagacattaataggttgtgcgaggaaatgctcgataaccgtgctactcttcaggctattgcttcagaatttagttctttaccatcatatgccgcttatgccactgcccaggaggcctatgagcaggctgtagctaatggtgattctgaagtcgttctcaaaaagttaaagaaatctttgaatgtggctaaatctgagtttgaccgtgatgctgccatgcaacgcaagttggaaaagatggcagatcaggctatgacccaaatgtacaaacaggcaagatctgaggacaagagggcaaaagtaactagtgctatgcaaacaatgctcttcactatgcttaggaagcttgataatgatgcacttaacaacattatcaacaatgcgcgtgatggttgtgttccactcaacatcataccattgactacagcagccaaactcatggttgttgtccctgattatggtacctacaagaacacttgtgatggtaacacctttacatatgcatctgcactctgggaaatccagcaagttgttgatgcggatagcaagattgttcaacttagtgaaattaacatggacaattcaccaaatttggcttggcctcttattgttacagctctaagagccaactcagctgttaaactacagaataatgaactgagtccagtagcactacgacagatgtcctgtgcggctggtaccacacaaacagcttgtactgatgacaatgcacttgcctactataacaattcgaagggaggtaggtttgtgctggcattactatcagaccaccaagatctcaaatgggctagattccctaagagtgatggtacaggtacaatttacacagaactggaaccaccttgtaggtttgttacagacacaccaaaagggcctaaagtgaaatacttgtacttcatcaaaggcttaaacaacctaaatagaggtatggtgctgggcagtttagctgctacagtacgtcttcaggctggaaatgctacagaagtacctgccaattcaactgtgctttccttctgtgcttttgcagtagaccctgctaaagcatataaggattacctagcaagtggaggacaaccaatcaccaactgtgtgaagatgttgtgtacacacactggtacaggacaggcaattactgtaacaccagaagctaacatggaccaagagtcctttggtggtgcttcatgttgtctgtattgtagatgccacattgaccatccaaatcctaaaggattctgtgacttgaaaggtaagtacgtccaaatacctaccacttgtgctaatgacccagtgggttttacacttagaaacacagtctgtaccgtctgcggaatgtggaaaggttatggctgtagttgtgaccaactccgcgaacccttgatgcagtctgcggatgcatcaacgtttttaaacgggtttgcggtgtaagtgcagcccgtcttacaccgtgcggcacaggcactagtactgatgtcgtctacagggcttttgatatttacaacgaaaaagttgctggttttgcaaagttcctaaaaactaattgctgtcgcttccaggagaaggatgaggaaggcaatttattagactcttactttgtagttaagaggcatactatgtctaactaccaacatgaagagactatttataacttggttaaagattgtccagcggttgctgtccatgactttttcaagtttagagtagatggtgacatggtaccacatatatcacgtcagcgtctaactaaatacacaatggctgatttagtctatgctctacgtcattttgatgagggtaattgtgatacattaaaagaaatactcgtcacatacaattgctgtgatgatgattatttcaataagaaggattggtatgacttcgtagagaatcctgacatcttacgcgtatatgctaacttaggtgagcgtgtacgccaatcattattaaagactgtacaattctgcgatgctatgcgtgatgcaggcattgtaggcgtactgacattagataatcaggatcttaatgggaactggtacgatttcggtgatttcgtacaagtagcaccaggctgcggagttcctattgtggattcatattactcattgctgatgcccatcctcactttgactagggcattggctgctgagtcccatatggatgctgatctcgcaaaaccacttattaagtgggatttgctgaaatatgattttacggaagagagactttgtctcttcgaccgttattttaaatattgggaccagacataccatcccaattgtattaactgtttggatgataggtgtatccttcattgtgcaaactttaatgtgttattttctactgtgtttccacctacaagttttggaccactagtaagaaaaatatttgtagatggtgttccttttgttgtttcaactggataccattttcgtgagttaggagtcgtacataatcaggatgtaaacttacatagctcgcgtctcagtttcaaggaacttttagtgtatgctgctgatccagctatgcatgcagcttctggcaatttattgctagataaacgcactacatgcttttcagtagctgcactaacaaacaatgttgcttttcaaactgtcaaacccggtaattttaataaagacttttatgactttgctgtgtctaaaggtttctttaaggaaggaagttctgttgaactaaaacacttcttctttgctcaggatggcaacgctgctatcagtgattatgactattatcgttataatctgccaacaatgtgtgatatcagacaactcctattcgtagttgaagttgttgataaatactttgattgttacgatggtggctgtattaatgccaaccaagtaatcgttaacaatctggataaatcagctggtttcccatttaataaatggggtaaggctagactttattatgactcaatgagttatgaggatcaagatgcacttttcgcgtatactaagcgtaatgtcatccctactataactcaaatgaatcttaagtatgccattagtgcaaagaatagagctcgcaccgtagctggtgtctctatctgtagtactatgacaaatagacagtttcatcagaaattattgaagtcaatagccgccactagaggagctactgtggtaattggaacaagcaagttttacggtggctggcataatatgttaaaaactgtttacagtgatgtagaaactccacaccttatgggttgggattatccaaaatgtgacagagccatgcctaacatgcttaggataatggcctctcttgttcttgctcgcaaacataacacttgctgtaacttatcacaccgtttctacaggttagctaacgagtgtgcgcaagtattaagtgagatggtcatgtgtggcggctcactatatgttaaaccaggtggaacatcatccggtgatgctacaactgcttatgctaatagtgtctttaacatttgtcaagctgttacagccaatgtaaatgcacttctttcaactgatggtaataagatagctgacaagtatgtccgcaatctacaacacaggctctatgagtgtctctatagaaatagggatgttgatcatgaattcgtggatgagttttacgcttacctgcgtaaacatttctccatgatgattctttctgatgatgccgttgtgtgctataacagtaactatgcggctcaaggtttagtagctagcattaagaactttaaggcagttctttattatcaaaataatgtgttcatgtctgaggcaaaatgttggactgagactgaccttactaaaggacctcacgaattttgctcacagcatacaatgctagttaaacaaggagatgattacgtgtacctgccttacccagatccatcaagaatattaggcgcaggctgttttgtcgatgatattgtcaaaacagatggtacacttatgattgaaaggttcgtgtcactggctattgatgcttacccacttacaaaacatcctaatcaggagtatgctgatgtctttcacttgtatttacaatacattagaaagttacatgatgagcttactggccacatgttggacatgtattccgtaatgctaactaatgataacacctcacggtactgggaacctgagttttatgaggctatgtacacaccacatacagtcttgcaggctgtaggtgcttgtgtattgtgcaattcacagacttcacttcgttgcggtgcctgtattaggagaccattcctatgttgcaagtgctgctatgaccatgtcatttcaacatcacacaaattagtgttgtctgttaatccctatgtttgcaatgccccaggttgtgatgtcactgatgtgacacaactgtatctaggaggtatgagctattattgcaagtcacataagcctcccattagttttccattatgtgctaatggtcaggtttttggtttatacaaaaacacatgtgtaggcagtgacaatgtcactgacttcaatgcgatagcaacatgtgattggactaatgctggcgattacatacttgccaacacttgtactgagagactcaagcttttcgcagcagaaacgctcaaagccactgaggaaacatttaagctgtcatatggtattgccactgtacgcgaagtactctctgacagagaattgcatctttcatgggaggttggaaaacctagaccaccattgaacagaaactatgtctttactggttaccgtgtaactaaaaatagtaaagtacagattggagagtacacctttgaaaaaggtgactatggtgatgctgttgtgtacagaggtactacgacatacaagttgaatgttggtgattactttgtgttgacatctcacactgtaatgccacttagtgcacctactctagtgccacaagagcactatgtgagaattactggcttgtacccaacactcaacatctcagatgagttttctagcaatgttgcaaattatcaaaaggtcggcatgcaaaagtactctacactccaaggaccacctggtactggtaagagtcattttgccatcggacttgctctctattacccatctgctcgcatagtgtatacggcatgctctcatgcagctgttgatgccctatgtgaaaaggcattaaaatatttgcccatagataaatgtagtagaatcatacctgcgcgtgcgcgcgtagagtgttttgataaattcaaagtgaattcaacactagaacagtatgttttctgcactgtaaatgcattgccagaaacaactgctgacattgtagtctttgatgaaatctctatggctactaattatgacttgagtgttgtcaatgctagacttcgtgcaaaacactacgtctatattggcgatcctgctcaattaccagccccccgcacattgctgactaaaggcacactagaaccagaatattttaattcagtgtgcagacttatgaaaacaataggtccagacatgttccttggaacttgtcgccgttgtcctgctgaaattgttgacactgtgagtgctttagtttatgacaataagctaaaagcacacaaggataagtcagctcaatgcttcaaaatgttctacaaaggtgttattacacatgatgtttcatctgcaatcaacagacctcaaataggcgttgtaagagaatttcttacacgcaatcctgcttggagaaaagctgtttttatctcaccttataattcacagaacgctgtagcttcaaaaatcttaggattgcctacgcagactgttgattcatcacagggttctgaatatgactatgtcatattcacacaaactactgaaacagcacactcttgtaatgtcaaccgcttcaatgtggctatcacaagggcaaaaattggcattttgtgcataatgtctgatagagatctttatgacaaactgcaatttacaagtctagaaataccacgtcgcaatgtggctacattacaagcagaaaatgtaactggactttttaaggactgtagtaagatcattactggtcttcatcctacacaggcacctacacacctcagcgttgatataaagttcaagactgaaggattatgtgttgacataccaggcataccaaaggacatgacctaccgtagactcatctctatgatgggtttcaaaatgaattaccaagtcaatggttaccctaatatgtttatcacccgcgaagaagctattcgtcacgttcgtgcgtggattggctttgatgtagagggctgtcatgcaactagagatgctgtgggtactaacctacctctccagctaggattttctacaggtgttaacttagtagctgtaccgactggttatgttgacactgaaaataacacagaattcaccagagttaatgcaaaacctccaccaggtgaccagtttaaacatcttataccactcatgtataaaggcttgccctggaatgtagtgcgtattaagatagtacaaatgctcagtgatacactgaaaggattgtcagacagagtcgtgttcgtcctttgggcgcatggctttgagcttacatcaatgaagtactttgtcaagattggacctgaaagaacgtgttgtctgtgtgacaaacgtgcaacttgcttttctacttcatcagatacttatgcctgctggaatcattctgtgggttttgactatgtctataacccatttatgattgatgttcagcagtggggctttacgggtaaccttcagagtaaccatgaccaacattgccaggtacatggaaatgcacatgtggctagttgtgatgctatcatgactagatgtttagcagtccatgagtgctttgttaagcgcgttgattggtctgttgaataccctattataggagatgaactgagggttaattctgcttgcagaaaagtacaacacatggttgtgaagtctgcattgcttgctgataagtttccagttcttcatgacattggaaatccaaaggctatcaagtgtgtgcctcaggctgaagtagaatggaagttctacgatgctcagccatgtagtgacaaagcttacaaaatagaggaactcttctattcttatgctacacatcacgataaattcactgatggtgtttgtttgttttggaattgtaacgttgatcgttacccagccaatgcaattgtgtgtaggtttgacacaagagtcttgtcaaacttgaacttaccaggctgtgatggtggtagtttgtatgtgaataagcatgcattccacactccagctttcgataaaagtgcatttactaatttaaagcaattgcctttcttttactattctgatagtccttgtgagtctcatggcaaacaagtagtgtcggatattgattatgttccactcaaatctgctacgtgtattacacgatgcaatttaggtggtgctgtttgcagacaccatgcaaatgagtaccgacagtacttggatgcatataatatgatgatttctgctggatttagcctatggatttacaaacaatttgatacttataacctgtggaatacatttaccaggttacagagtttagaaaatgtggcttataatgttgttaataaaggacactttgatggacacgccggcgaagcacctgtttccatcattaataatgctgtttacacaaaggtagatggtattgatgtggagatctttgaaaataagacaacacttcctgttaatgttgcatttgagctttgggctaagcgtaacattaaaccagtgccagagattaagatactcaataatttgggtgttgatatcgctgctaatactgtaatctgggactacaaaagagaagccccagcacatgtatctacaataggtgtctgcacaatgactgacattgccaagaaacctactgagagtgcttgttcttcacttactgtcttgtttgatggtagagtggaaggacaggtagacctttttagaaacgcccgtaatggtgttttaataacagaaggttcagtcaaaggtctaacaccttcaaagggaccagcacaagctagcgtcaatggagtcacattaattggagaatcagtaaaaacacagtttaactactttaagaaagtagacggcattattcaacagttgcctgaaacctactttactcagagcagagacttagaggattttaagcccagatcacaaatggaaactgactttctcgagctcgctatggatgaattcatacagcgatataagctcgagggctatgccttcgaacacatcgtttatggagatttcagtcatggacaacttggcggtcttcatttaatgataggcttagccaagcgctcacaagattcaccacttaaattagaggattttatccctatggacagcacagtgaaaaattacttcataacagatgcgcaaacaggttcatcaaaatgtgtgtgttctgtgattgatcttttacttgatgactttgtcgagataataaagtcacaagatttgtcagtgatttcaaaagtggtcaaggttacaattgactatgctgaaatttcattcatgctttggtgtaaggatggacatgttgaaaccttctacccaaaactacaagcaagtcaagcgtggcaaccaggtgttgcgatgcctaacttgtacaagatgcaaagaatgcttcttgaaaagtgtgaccttcagaattatggtgaaaatgctgttataccaaaaggaataatgatgaatgtcgcaaagtatactcaactgtgtcaatacttaaatacacttactttagctgtaccctacaacatgagagttattcactttggtgctggctctgataaaggagttgcaccaggtacagctgtgctcagacaatggttgccaactggcacactacttgtcgattcagatcttaatgacttcgtctccgacgcagattctactttaattggagactgtgcaacagtacatacggctaataaatgggaccttattattagcgatatgtatgaccctaggaccaaacatgtgacaaaagagaatgactctaaagaagggtttttcacttatctgtgtggatttataaagcaaaaactagccctgggtggttctatagctgtaaagataacagagcattcttggaatgctgacctttacaagcttatgggccatttctcatggtggacagcttttgttacaaatgtaaatgcatcatcatcggaagcatttttaattggggctaactatcttggcaagccgaaggaacaaattgatggctataccatgcatgctaactacattttctggaggaacacaaatcctatccagttgtcttcctattcactctttgacatgagcaaatttcctcttaaattaagaggaactgctgtaatgtctcttaaggagaatcaaatcaatgatatgatttattctcttctggaaaaaggtaggcttatcattagagaaaacaacagagttgtggtttcaagtgatattcttgttaacaactaaacgaacatgtttattttcttattatttcttactctcactagtggtagtgaccttgaccggtgcaccacttttgatgatgttcaagctcctaattacactcaacatacttcatctatgaggggggtttactatcctgatgaaatttttagatcagacactctttatttaactcaggatttatttcttccattttattctaatgttacagggtttcatactattaatcatacgtttggcaaccctgtcataccttttaaggatggtatttattttgctgccacagagaaatcaaatgttgtccgtggttgggtttttggttctaccatgaacaacaagtcacagtcggtgattattattaacaattctactaatgttgttatacgagcatgtaactttgaattgtgtgacaaccctttctttgctgtttctaaacccatgggtacacagacacatactatgatattcgataatgcatttaattgcactttcgagtacatatctgatgccttttcgcttgatgtttcagaaaagtcaggtaattttaaacacttacgagagtttgtgtttaaaaataaagatgggtttctctatgtttataagggctatcaacctatagatgtagttcgtgatctaccttctggttttaacactttgaaacctatttttaagttgcctcttggtattaacattacaaattttagagccattcttacagccttttcacctgctcaagacatttggggcacgtcagctgcagcctattttgttggctatttaaagccaactacatttatgctcaagtatgatgaaaatggtacaatcacagatgctgttgattgttctcaaaatccacttgctgaactcaaatgctctgttaagagctttgagattgacaaaggaatttaccagacctctaatttcagggttgttccctcaggagatgttgtgagattccctaatattacaaacttgtgtccttttggagaggtttttaatgctactaaattcccttctgtctatgcatgggagagaaaaaaaatttctaattgtgttgctgattactctgtgctctacaactcaacatttttttcaacctttaagtgctatggcgtttctgccactaagttgaatgatctttgcttctccaatgtctatgcagattcttttgtagtcaagggagatgatgtaagacaaatagcgccaggacaaactggtgttattgctgattataattataaattgccagatgatttcatgggttgtgtccttgcttggaatactaggaacattgatgctacttcaactggtaattataattataaatataggtatcttagacatggcaagcttaggccctttgagagagacatatctaatgtgcctttctcccctgatggcaaaccttgcaccccacctgctcttaattgttattggccattaaatgattatggtttttacaccactactggcattggctaccaaccttacagagttgtagtactttcttttgaacttttaaatgcaccggccacggtttgtggaccaaaattatccactgaccttattaagaaccagtgtgtcaattttaattttaatggactcactggtactggtgtgttaactccttcttcaaagagatttcaaccatttcaacaatttggccgtgatgtttctgatttcactgattccgttcgagatcctaaaacatctgaaatattagacatttcaccttgctcttttgggggtgtaagtgtaattacacctggaacaaatgcttcatctgaagttgctgttctatatcaagatgttaactgcactgatgtttctacagcaattcatgcagatcaactcacaccagcttggcgcatatattctactggaaacaatgtattccagactcaagcaggctgtcttataggagctgagcatgtcgacacttcttatgagtgcgacattcctattggagctggcatttgtgctagttaccatacagtttctttattacgtagtactagccaaaaatctattgtggcttatactatgtctttaggtgctgatagttcaattgcttactctaataacaccattgctatacctactaacttttcaattagcattactacagaagtaatgcctgtttctatggctaaaacctccgtagattgtaatatgtacatctgcggagattctactgaatgtgctaatttgcttctccaatatggtagcttttgcacacaactaaatcgtgcactctcaggtattgctgctgaacaggatcgcaacacacgtgaagtgttcgctcaagtcaaacaaatgtacaaaaccccaactttgaaatattttggtggttttaatttttcacaaatattacctgaccctctaaagccaactaagaggtcttttattgaggacttgctctttaataaggtgacactcgctgatgctggcttcatgaagcaatatggcgaatgcctaggtgatattaatgctagagatctcatttgtgcgcagaagttcaatggacttacagtgttgccacctctgctcactgatgatatgattgctgcctacactgctgctctagttagtggtactgccactgctggatggacatttggtgctggcgctgctcttcaaataccttttgctatgcaaatggcatataggttcaatggcattggagttacccaaaatgttctctatgagaaccaaaaacaaatcgccaaccaatttaacaaggcgattagtcaaattcaagaatcacttacaacaacatcaactgcattgggcaagctgcaagacgttgttaaccagaatgctcaagcattaaacacacttgttaaacaacttagctctaattttggtgcaatttcaagtgtgctaaatgatatcctttcgcgacttgataaagtcgaggcggaggtacaaattgacaggttaattacaggcagacttcaaagccttcaaacctatgtaacacaacaactaatcagggctgctgaaatcagggcttctgctaatcttgctgctactaaaatgtctgagtgtgttcttggacaatcaaaaagagttgacttttgtggaaagggctaccaccttatgtccttcccacaagcagccccgcatggtgttgtcttcctacatgtcacgtatgtgccatcccaggagaggaacttcaccacagcgccagcaatttgtcatgaaggcaaagcatacttccctcgtgaaggtgtttttgtgtttaatggcacttcttggtttattacacagaggaacttcttttctccacaaataattactacagacaatacatttgtctcaggaaattgtgatgtcgttattggcatcattaacaacacagtttatgatcctctgcaacctgagcttgactcattcaaagaagagctggacaagtacttcaaaaatcatacatcaccagatgttgatcttggcgacatttcaggcattaacgcttctgtcgtcaacattcaaaaagaaattgaccgcctcaatgaggtcgctaaaaatttaaatgaatcactcattgaccttcaagaattgggaaaatatgagcaatatattaaatggccttggtatgtttggctcggcttcattgctggactaattgccatcgtcatggttacaatcttgctttgttgcatgactagttgttgcagttgcctcaagggtgcatgctcttgtggttcttgctgcaagtttgatgaggatgactctgagccagttctcaagggtgtcaaattacattacacataaacgaacttatggatttgtttatgagattttttactcttggatcaattactgcacagccagtaaaaattgacaatgcttctcctgcaagtactgttcatgctacagcaacgataccgctacaagcctcactccctttcggatggcttgttattggcgttgcatttcttgctgtttttcagagcgctaccaaaataattgcgctcaataaaagatggcagctagccctttataagggcttccagttcatttgcaatttactgctgctatttgttaccatctattcacatcttttgcttgtcgctgcaggtatggaggcgcaatttttgtacctctatgccttgatatattttctacaatgcatcaacgcatgtagaattattatgagatgttggctttgttggaagtgcaaatccaagaacccattactttatgatgccaactactttgtttgctggcacacacataactatgactactgtataccatataacagtgtcacagatacaattgtcgttactgaaggtgacggcatttcaacaccaaaactcaaagaagactaccaaattggtggttattctgaggataggcactcaggtgttaaagactatgtcgttgtacatggctatttcaccgaagtttactaccagcttgagtctacacaaattactacagacactggtattgaaaatgctacattcttcatctttaacaagcttgttaaagacccaccgaatgtgcaaatacacacaatcgacggctcttcaggagttgctaatccagcaatggatccaatttatgatgagccgacgacgactactagcgtgcctttgtaagcacaagaaagtgagtacgaacttatgtactcattcgtttcggaagaaacaggtacgttaatagttaatagcgtacttctttttcttgctttcgtggtattcttgctagtcacactagccatccttactgcgcttcgattgtgtgcgtactgctgcaatattgttaacgtgagtttagtaaaaccaacggtttacgtctactcgcgtgttaaaaatctgaactcttctgaaggagttcctgatcttctggtctaaacgaactaactattattattattctgtttggaactttaacattgcttatcatggcagacaacggtactattaccgttgaggagcttaaacaactcctggaacaatggaacctagtaataggtttcctatgcctagcctggattatgttactacaatttgcctattctaatcggaacaggtttttgtacataataaagcttgttttcctctggctcttgtggccagtaacacttgcttgttttgtgcttgctgctgtctacagaattaattgggtgactggcgggattgcgattgcaatggcttgtattgtaggcttgatgtggcttagctacttcgttgcttccttcaggctgtttgctcgtacccgctcaatgtggtcattcaacccagaaacaaacattcttctcaatgtgcctctccgggggacaattgtgaccagaccgctcatggaaagtgaacttgtcattggtgctgtgatcattcgtggtcacttgcgaatggccggacactccctagggcgctgtgacattaaggacctgccaaaagagatcactgtggctacatcacgaacgctttcttattacaaattaggagcgtcgcagcgtgtaggcactgattcaggttttgctgcatacaaccgctaccgtattggaaactataaattaaatacagaccacgccggtagcaacgacaatattgctttgctagtacagtaagtgacaacagatgtttcatcttgttgacttccaggttacaatagcagagatattgattatcattatgaggactttcaggattgctatttggaatcttgacgttataataagttcaatagtgagacaattatttaagcctctaactaagaagaattattcggagttagatgatgaagaacctatggagttagattatccataaaacgaacatgaaaattattctcttcctgacattgattgtatttacatcttgcgagctatatcactatcaggagtgtgttagaggtacgactgtactactaaaagaaccttgcccatcaggaacatacgagggcaattcaccatttcaccctcttgctgacaataaatttgcactaacttgcactagcacacactttgcttttgcttgtgctgacggtactcgacatacctatcagctgcgtgcaagatcagtttcaccaaaacttttcatcagacaagaggaggttcaacaagagctctactcgccactttttctcattgttgctgctctagtatttttaatactttgcttcaccattaagagaaagacagaatgaatgagctcactttaattgacttctatttgtgctttttagcctttctgctattccttgttttaataatgcttattatattttggttttcactcgaaatccaggatctagaagaaccttgtaccaaagtctaaacgaacatgaaacttctcattgttttgacttgtatttctctatgcagttgcatatgcactgtagtacagcgctgtgcatctaataaacctcatgtgcttgaagatccttgtaaggtacaacactaggggtaatacttatagcactgcttggctttgtgctctaggaaaggttttaccttttcatagatggcacactatggttcaaacatgcacacctaatgttactatcaactgtcaagatccagctggtggtgcgcttatagctaggtgttggtaccttcatgaaggtcaccaaactgctgcatttagagacgtacttgttgttttaaataaacgaacaaattaaaatgtctgataatggaccccaatcaaaccaacgtagtgccccccgcattacatttggtggacccacagattcaactgacaataaccagaatggaggacgcaatggggcaaggccaaaacagcgccgaccccaaggtttacccaataatactgcgtcttggttcacagctctcactcagcatggcaaggaggaacttagattccctcgaggccagggcgttccaatcaacaccaatagtggtccagatgaccaaattggctactaccgaagagctacccgacgagttcgtggtggtgacggcaaaatgaaagagctcagccccagatggtacttctattacctaggaactggcccagaagcttcacttccctacggcgctaacaaagaaggcatcgtatgggttgcaactgagggagccttgaatacacccaaagaccacattggcacccgcaatcctaataacaatgctgccaccgtgctacaacttcctcaaggaacaacattgccaaaaggcttctacgcagagggaagcagaggcggcagtcaagcctcttctcgctcctcatcacgtagtcgcggtaattcaagaaattcaactcctggcagcagtaggggaaattctcctgctcgaatggctagcggaggtggtgaaactgccctcgcgctattgctgctagacagattgaaccagcttgagagcaaagtttctggtaaaggccaacaacaacaaggccaaactgtcactaagaaatctgctgctgaggcatctaaaaagcctcgccaaaaacgtactgccacaaaacagtacaacgtcactcaagcatttgggagacgtggtccagaacaaacccaaggaaatttcggggaccaagacctaatcagacaaggaactgattacaaacattggccgcaaattgcacaatttgctccaagtgcctctgcattctttggaatgtcacgcattggcatggaagtcacaccttcgggaacatggctgacttatcatggagccattaaattggatgacaaagatccacaattcaaagacaacgtcatactgctgaacaagcacattgacgcatacaaaacattcccaccaacagagcctaaaaaggacaaaaagaaaaagactgatgaagctcagcctttgccgcagagacaaaagaagcagcccactgtgactcttcttcctgcggctgacatggatgatttctccagacaacttcaaaattccatgagtggagcttctgctgattcaactcaggcataaacactcatgatgaccacacaaggcagatgggctatgtaaacgttttcgcaattccgtttacgatacatagtctactcttgtgcagaatgaattctcgtaactaaacagcacaagtaggtttagttaactttaatctcacatagcaatctttaatcaatgtgtaacattagggaggacttgaaagagccaccacattttcatcgaggccacgcggagtacgatcgagggtacagtgaataatgctagggagagctgcctatatggaagagccctaatgtgtaaaattaattttagtagtgctatccccatgtgattttaatagcttcttaggagaatgac

SEQ ID NO: 29781 - DNA, 29725 bp, SARS Coronavirus
atattaggtttttacctacccaggaaaagccaaccaacctcgatctcttgtagatctgttctctaaacgaactttaaaatctgtgtagctgtcgctcggctgcatgcctagtgcacctacgcagtataaacaataataaattttactgtcgttgacaagaaacgagtaactcgtccctcttctgcagactgcttacggtttcgtccgtgttgcagtcgatcatcagcatacctaggtttcgtccgggtgtgaccgaaaggtaagatggagagccttgttcttggtgtcaacgagaaaacacacgtccaactcagtttgcctgtccttcaggttagagacgtgctagtgcgtggcttcggggactctgtggaagaggccctatcggaggcacgtgaacacctcaaaaatggcacttgtggtctagtagagctggaaaaaggcgtactgccccagcttgaacagccctatgtgttcattaaacgttctgatgccttaagcaccaatcacggccacaaggtcgttgagctggttgcagaaatggacggcattcagtacggtcgtagcggtataacactgggagtactcgtgccacatgtgggcgaaaccccaattgcataccgcaatgttcttcttcgtaagaacggtaataagggagccggtggtcatagctatggcatcgatctaaagtcttatgacttaggtgacgagcttggcactgatcccattgaagattatgaacaaaactggaacactaagcatggcagtggtgcactccgtgaactcactcgtgagctcaatggaggtgcagtcactcgctatgtcgacaacaatttctgtggcccagatgggtaccctcttgattgcatcaaagattttctcgcacgcgcgggcaagtcaatgtgcactctttccgaacaacttgattacatcgagtcgaagagaggtgtctactgctgccgtgaccatgagcatgaaattgcctggttcactgagcgctctgataagagctacgagcaccagacacccttcgaaattaagagtgccaagaaatttgacactttcaaaggggaatgcccaaagtttgtgtttcctcttaactcaaaagtcaaagtcattcaaccacgtgttgaaaagaaaaagactgagggtttcatggggcgtatacgctctgtgtaccctgttgcatctccacaggagtgtaacaatatgcacttgtctaccttgatgaaatgtaatcattgcgatgaagtttcatggcagacgtgcgactttctgaaagccacttgtgaacattgtggcactgaaaatttagttattgaaggacctactacatgtgggtacctacctactaatgctgtagtgaaaatgccatgtcctgcctgtcaagacccagagattggacctgagcatagtgttgcagattatcacaaccactcaaacattgaaactcgactccgcaagggaggtaggactagatgttttggaggctgtgtgtttgcctatgttggctgctataataagcgtgcctactgggttcctcgtgctagtgctgatattggctcaggccatactggcattactggtgacaatgtggagaccttgaatgaggatctccttgagatactgagtcgtgaacgtgttaacattaacattgttggcgattttcatttgaatgaagaggttgccatcattttggcatctttctctgcttctacaagtgcctttattgacactataaagagtcttgattacaagtctttcaaaaccattgttgagtcctgcggtaactataaagttaccaagggaaagcccgtaaaaggtgcttggaacattggacaacagagatcagttttaacaccactgtgtggttttccctcacaggctgctggtgttatcagatcaatttttgcgcgcacacttgatgcagcaaaccactcaattcctgatttgcaaagagcagctgtcaccatacttgatggtatttctgaacagtcattacgtcttgtcgacgccatggtttatacttcagacctgctcaccaacagtgtcattattatggcatatgtaactggtggtcttgtacaacagacttctcagtggttgtctaatcttttgggcactactgttgaaaaactcaggcctatctttgaatggattgaggcgaaacttagtgcaggagttgaatttctcaaggatgcttgggagattctcaaatttctcattacaggtgtttttgacatcgtcaagggtcaaatacaggttgcttcagataacatcaaggattgtgtaaaatgcttcattgatgttgttaacaaggcactcgaaatgtgcattgatcaagtcactatcgctggcgcaaagttgcgatcactcaacttaggtgaagtcttcatcgctcaaagcaagggactttaccgtcagtgtatacgtggcaaggagcagctgcaactactcatgcctcttaaggcaccaaaagaagtaacctttcttgaaggtgattcacatgacacagtacttacctctgaggaggttgttctcaagaacggtgaactcgaagcactcgagacgcccgttgatagcttcacaaatggagctatcgttggcacaccagtctgtgtaaatggcctcatgctcttagagattaaggacaaagaacaatactgcgcattgtctcctggtttactggctacaaacaatgtctttcgcttaaaagggggtgcaccaattaaaggtgtaacctttggagaagatactgtttgggaagttcaaggttacaagaatgtgagaatcacatttgagcttgatgaacgtgttgacaaagtgcttaatgaaaagtgctctgtctacactgttgaatccggtaccgaagttactgagtttgcatgtgttgtagcagaggctgttgtgaagactttacaaccagtttctgatctccttaccaacatgggtattgatcttgatgagtggagtgtagctacattctacttatttgatgatgctggtgaagaaaacttttcatcacgtatgtattgttccttttaccctccagatgaggaagaagaggacgatgcagagtgtgaggaagaagaaattgatgaaacctgtgaacatgagtacggtacagaggatgattatcaaggtctccctctggaatttggtgcctcagctgaaacagttcgagttgaggaagaagaagaggaagactggctggatgatactactgagcaatcagagattgagccagaaccagaacctacacctgaagaaccagttaatcagtttactggttatttaaaacttactgacaatgttgccattaaatgtgttgacatcgttaaggaggcacaaagtgctaatcctatggtgattgtaaatgctgctaacatacacctgaaacatggtggtggtgtagcaggtgcactcaacaaggcaaccaatggtgccatgcaaaaggagagtgatgattacattaagctaaatggccctcttacagtaggagggtcttgtttgctttctggacataatcttgctaagaagtgtctgcatgttgttggacctaacctaaatgcaggtgaggacatccagcttcttaaggcagcatatgaaaatttcaattcacaggacatcttacttgcaccattgttgtcagcaggcatatttggtgctaaaccacttcagtctttacaagtgtgcgtgcagacggttcgtacacaggtttatattgcagtcaatgacaaagctctttatgagcaggttgtcatggattatcttgataacctgaagcctagagtggaagcacctaaacaagaggagccaccaaacacagaagattccaaaactgaggagaaatccgtcgtacagaagcctgtcgatgtgaagccaaaaattaaggcctgcattgatgaggttaccacaacactggaagaaactaagtttcttaccaataagttactcttgtttgctgatatcaatggtaagctttaccatgattctcagaacatgcttagaggtgaagatatgtctttccttgagaaggatgcaccttacatggtaggtgatgttatcactagtggtgatatcacttgtgttgtaataccctccaaaaaggctggtggcactactgagatgctctcaagagctttgaagaaagtgccagttgatgagtatataaccacgtaccctggacaaggatgtgctggttatacacttgaggaagctaagactgctcttaagaaatgcaaatctgcattttatgtactaccttcagaagcacctaatgctaaggaagagattctaggaactgtatcctggaatttgagagaaatgcttgctcatgctgaagagacaagaaaattaatgcctatatgcatggatgttagagccataatggcaaccatccaacgtaagtataaaggaattaaaattcaagagggcatcgttgactatggtgtccgattcttcttttatactagtaaagagcctgtagcttctattattacgaagctgaactctctaaatgagccgcttgtcacaatgccaattggttatgtgacacatggttttaatcttgaagaggctgcgcgctgtatgcgttctcttaaagctcctgccgtagtgtcagtatcatcaccagatgctgttactacatataatggatacctcacttcgtcatcaaagacatctgaggagcactttgtagaaacagtttctttggctggctcttacagagattggtcctattcaggacagcgtacagagttaggtgttgaatttcttaagcgtggtgacaaaattgtgtaccacactctggagagccccgtcgagtttcatcttgacggtgaggttctttcacttgacaaactaaagagtctcttatccctgcgggaggttaagactataaaagtgttcacaactgtggacaacactaatctccacacacagcttgtggatatgtctatgacatatggacagcagtttggtccaacatacttggatggtgctgatgttacaaaaattaaacctcatgtaaatcatgagggtaagactttctttgtactacctagtgatgacacactacgtagtgaagctttcgagtactaccatactcttgatgagagttttcttggtaggtacatgtctgctttaaaccacacaaagaaatggaaatttcctcaagttggtggtttaacttcaattaaatgggctgataacaattgttatttgtctagtgttttattagcacttcaacagcttgaagtcaaattcaatgcaccagcacttcaagaggcttattatagagcccgtgctggtgatgctgctaacttttgtgcactcatactcgcttacagtaataaaactgttggcgagcttggtgatgtcagagaaactatgacccatcttctacagcatgctaatttggaatctgcaaagcgagttcttaatgtggtgtgtaaacattgtggtcagaaaactactaccttaacgggtgtagaagctgtgatgtatatgggtactctatcttatgataatcttaagacaggtgtttccattccatgtgtgtgtggtcgtgatgctacacaatatctagtacaacaagagtcttcttttgttatgatgtctgcaccacctgctgagtataaattacagcaaggtacattcttatgtgcgaatgagtacactggtaactatcagtgtggtcattacactcatataactgctaaggagaccctctatcgtattgacggagctcaccttacaaagatgtcagagtacaaaggaccagtgactgatgttttctacaaggaaacatcttacactacaaccatcaagcctgtgtcgtataaactcgatggagttacttacacagagattgaaccaaaattggatgggtattataaaaaggataatgcttactatacagagcagcctatagaccttgtaccaactcaaccattaccaaatgcgagttttgataatttcaaactcacatgttctaacacaaaatttgctgatgatttaaatcaaatgacaggcttcacaaagccagcttcacgagagctatctgtcacattcttcccagacttgaatggcgatgtagtggctattgactatagacactattcagcgagtttcaagaaaggtgctaaattactgcataagccaattgtttggcacattaaccaggctacaaccaagacaacgttcaaaccaaacacttggtgtttacgttgtctttggagtacaaagccagtagatacttcaaattcatttgaagttctggcagtagaagacacacaaggaatggacaatcttgcttgtgaaagtcaacaacccacctctgaagaagtagtggaaaatcctaccatacagaaggaagtcatagagtgtgacgtgaaaactaccgaagttgtaggcaatgtcatacttaaaccatcagatgaaggtgttaaagtaacacaagagttaggtcatgaggatcttatggctgcttatgtggaaaacacaagcattaccattaagaaacctaatgagctttcactagccttaggtttaaaaacaattgccactcatggtattgctgcaattaatagtgttccttggagtaaaattttggcttatgtcaaaccattcttaggacaagcagcaattacaacatcaaattgcgctaagagattagcacaacgtgtgtttaacaattatatgccttatgtgtttacattattgttccaattgtgtacttttactaaaagtaccaattctagaattagagcttcactacctacaactattgctaaaaatagtgttaagagtgttgctaaattatgtttggatgccggcattaattatgtgaagtcacccaaattttctaaattgttcacaatcgctatgtggctattgttgttaagtatttgcttaggttctctaatctgtgtaactgctgcttttggtgtactcttatctaattttggtgctccttcttattgtaatggcgttagagaattgtatcttaattcgtctaacgttactactatggatttctgtgaaggttcttttccttgcagcatttgtttaagtggattagactcccttgattcttatccagctcttgaaaccattcaggtgacgatttcatcgtacaagctagacttgacaattttaggtctggccgctgagtgggttttggcatatatgttgttcacaaaattcttttatttattaggtctttcagctataatgcaggtgttctttggctattttgctagtcatttcatcagcaattcttggctcatgtggtttatcattagtattgtacaaatggcacccgtttctgcaatggttaggatgtacatcttctttgcttctttctactacatatggaagagctatgttcatatcatggatggttgcacctcttcgacttgcatgatgtgctataagcgcaatcgtgccacacgcgttgagtgtacaactattgttaatggcatgaagagatctttctatgtctatgcaaatggaggccgtggcttctgcaagactcacaattggaattgtctcaattgtgacacattttgcactggtagtacattcattagtgatgaagttgctcgtgatttgtcactccagtttaaaagaccaatcaaccctactgaccagtcatcgtatattgttgatagtgttgctgtgaaaaatggcgcgcttcacctctactttgacaaggctggtcaaaagacctatgagagacatccgctctcccattttgtcaatttagacaatttgagagctaacaacactaaaggttcactgcctattaatgtcatagtttttgatggcaagtccaaatgcgacgagtctgcttctaagtctgcttctgtgtactacagtcagctgatgtgccaacctattctgttgcttgaccaagctcttgtatcagacgttggagatagtactgaagtttccgttaagatgtttgatgcttatgtcgacaccttttcagcaacttttagtgttcctatggaaaaacttaaggcacttgttgctacagctcacagcgagttagcaaagggtgtagctttagatggtgtcctttctacattcgtgtcagctgcccgacaaggtgttgttgataccgatgttgacacaaaggatgttattgaatgtctcaaactttcacatcactctgacttagaagtgacaggtgacagttgtaacaatttcatgctcacctataataaggttgaaaacatgacgcccagagatcttggcgcatgtattgactgtaatgcaaggcatatcaatgcccaagtagcaaaaagtcacaatgtttcactcatctggaatgtaaaagactacatgtctttatctgaacagctgcgtaaacaaattcgtagtgctgccaagaagaacaacataccttttagactaacttgtgctacaactagacaggttgtcaatgtcataactactaaaatctcactcaagggtggtaagattgttagtacttgttttaaacttatgcttaaggccacattattgtgcgttcttgctgcattggtttgttatatcgttatgccagtacatacattgtcaatccatgatggttacacaaatgaaatcattggttacaaagccattcaggatggtgtcactcgtgacatcatttctactgatgattgttttgcaaataaacatgctggttttgacgcatggtttagccagcgtggtggttcatacaaaaatgacaaaagctgccctgtagtagctgctatcattacaagagagattggtttcatagtgcctggcttaccgggtactgtgctgagagcaatcaatggtgacttcttgcattttctacctcgtgtttttagtgctgttggcaacatttgctacacaccttccaaactcattgagtatagtgattttgctacctctgcttgcgttcttgctgctgagtgtacaatttttaaggatgctatgggcaaacctgtgccatattgttatgacactaatttgctagagggttctatttcttatagtgagcttcgtccagacactcgttatgtgcttatggatggttccatcatacagtttcctaacacttacctggagggttctgttagagtagtaacaacttttgatgctgagtactgtagacatggtacatgcgaaaggtcagaagtaggtatttgcctatctaccagtggtagatgggttcttaataatgagcattacagagctctatcaggagttttctgtggtgttgatgcgatgaatctcatagctaacatctttactcctcttgtgcaacctgtgggtgctttagatgtgtctgcttcagtagtggctggtggtattattgccatattggtgacttgtgctgcctactactttatgaaattcagacgtgtttttggtgagtacaaccatgttgttgctgctaatgcacttttgtttttgatgtctttcactatactctgtctggtaccagcttacagctttctgccgggagtctactcagtcttttacttgtacttgacattctatttcaccaatgatgtttcattcttggctcaccttcaatggtttgccatgttttctcctattgtgcctttttggataacagcaatctatgtattctgtatttctctgaagcactgccattggttctttaacaactatcttaggaaaagagtcatgtttaatggagttacatttagtaccttcgaggaggctgctttgtgtacctttttgctcaacaaggaaatgtacctaaaattgcgtagcgagacactgttgccacttacacagtataacaggtatcttgctctatataacaagtacaagtatttcagtggagccttagatactaccagctatcgtgaagcagcttgctgccacttagcaaaggctctaaatgactttagcaactcaggtgctgatgttctctaccaaccaccacagacatcaatcacttctgctgttctgcagagtggttttaggaaaatggcattcccgtcaggcaaagttgaagggtgcatggtacaagtaacctgtggaactacaactcttaatggattgtggttggatgacacagtatactgtccaagacatgtcatttgcacagcagaagacatgcttaatcctaactatgaagatctgctcattcgcaaatccaaccatagctttcttgttcaggctggcaatgttcaacttcgtgttattggccattctatgcaaaattgtctgcttaggcttaaagttgatacttctaaccctaagacacccaagtataaatttgtccgtatccaacctggtcaaacattttcagttctagcatgctacaatggttcaccatctggtgtttatcagtgtgccatgagacctaatcataccattaaaggttctttccttaatggatcatgtggtagtgttggttttaacattgattatgattgcgtgtctttctgctatatgcatcatatggagcttccaacaggagtacacgctggtactgacttagaaggtaaattctatggtccatttgttgacagacaaactgcacaggctgcaggtacagacacaaccataacattaaatgttttggcatggctgtatgctgctgttatcaatggtgataggtggtttcttaatagattcaccactactttgaatgactttaaccttgtggcaatgaagtacaactatgaacctttgacacaagatcatgttgacatattgggacctctttctgctcaaacaggaattgccgtcttagatatgtgtgctgctttgaaagagctgctgcagaatggtatgaatggtcgtactatccttggtagcactattttagaagatgagtttacaccatttgatgttgttagacaatgctctggtgttaccttccaaggtaagttcaagaaaattgttaagggcactcatcattggatgcttttaactttcttgacatcactattgattcttgttcaaagtacacagtggtcactgtttttctttgtttacgagaatgctttcttgccatttactcttggtattatggcaattgctgcatgtgctatgctgcttgttaagcataagcacgcattcttgtgcttgtttctgttaccttctcttgcaacagttgcttactttaatatggtctacatgcctgctagctgggtgatgcgtatcatgacatggcttgaattggctgacactagcttgtctggttataggcttaaggattgtgttatgtatgcttcagctttagttttgcttattctcatgacagctcgcactgtttatgatgatgctgctagacgtgtttggacactgatgaatgtcattacacttgtttacaaagtctactatggtaatgctttagatcaagctatttccatgtgggccttagttatttctgtaacctctaactattctggtgtcgttacgactatcatgtttttagctagagctatagtgtttgtgtgtgttgagtattatccattgttatttattactggcaacaccttacagtgtatcatgcttgtttattgtttcttaggctattgttgctgctgctactttggccttttctgtttactcaaccgttacttcaggcttactcttggtgtttatgactacttggtctctacacaagaatttaggtatatgaactcccaggggcttttgcctcctaagagtagtattgatgctttcaagcttaacattaagttgttgggtattggaggtaaaccatgtatcaaggttgctactgtacagtctaaaatgtctgacgtaaagtgcacatctgtggtactgctctcggttcttcaacaacttagagtagagtcatcttctaaattgtgggcacaatgtgtacaactccacaatgatattcttcttgcaaaagacacaactgaagctttcgagaagatggtttctcttttgtctgttttgctatccatgcagggtgctgtagacattaataggttgtgcgaggaaatgctcgataaccgtgctactcttcaggctattgcttcagaatttagttctttaccatcatatgccgcttatgccactgcccaggaggcctatgagcaggctgtagctaatggtgattctgaagtcgttctcaaaaagttaaagaaatctttgaatgtggctaaatctgagtttgaccgtgatgctgccatgcaacgcaagttggaaaagatggcagatcaggctatgacccaaatgtacaaacaggcaagatctgaggacaagagggcaaaagtaactagtgctatgcaaacaatgctcttcactatgcttaggaagcttgataatgatgcacttaacaacattatcaacaatgcgcgtgatggttgtgttccactcaacatcataccattgactacagcagccaaactcatggttgttgtccctgattatggtacctacaagaacacttgtgatggtaacacctttacatatgcatctgcactctgggaaatccagcaagttgttgatgcggatagcaagattgttcaacttagtgaaattaacatggacaattcaccaaatttggcttggcctcttattgttacagctctaagagccaactcagctgttaaactacagaataatgaactgagtccagtagcactacgacagatgtcctgtgcggctggtaccacacaaacagcttgtactgatgacaatgcacttgcctactataacaattcgaagggaggtaggtttgtgctggcattactatcagaccaccaagatctcaaatgggctagattccctaagagtgatggtacaggtacaatttacacagaactggaaccaccttgtaggtttgttacagacacaccaaaagggcctaaagtgaaatacttgtacttcatcaaaggcttaaacaacctaaatagaggtatggtgctgggcagtttagctgctacagtacgtcttcaggctggaaatgctacagaagtacctgccaattcaactgtgctttccttctgtgcttttgcagtagaccctgctaaagcatataaggattacctagcaagtggaggacaaccaatcaccaactgtgtgaagatgttgtgtacacacactggtacaggacaggcaattactgtaacaccagaagctaacatggaccaagagtcctttggtggtgcttcatgttgtctgtattgtagatgccacattgaccatccaaatcctaaaggattctgtgacttgaaaggtaagtacgtccaaatacctaccacttgtgctaatgacccagtgggttttacacttagaaacacagtctgtaccgtctgcggaatgtggaaaggttatggctgtagttgtgaccaactccgcgaacccttgatgcagtctgcggatgcatcaacgtttttaaacgggtttgcggtgtaagtgcagcccgtcttacaccgtgcggcacaggcactagtactgatgtcgtctacagggcttttgatatttacaacgaaaaagttgctggttttgcaaagttcctaaaaactaattgctgtcgcttccaggagaaggatgaggaaggcaatttattagactcttactttgtagttaagaggcatactatgtctaactaccaacatgaagagactatttataacttggttaaagattgtccagcggttgctgtccatgactttttcaagtttagagtagatggtgacatggtaccacatatatcacgtcagcgtctaactaaatacacaatggctgatttagtctatgctctacgtcattttgatgagggtaattgtgatacattaaaagaaatactcgtcacatacaattgctgtgatgatgattatttcaataagaaggattggtatgacttcgtagagaatcctgacatcttacgcgtatatgctaacttaggtgagcgtgtacgccaatcattattaaagactgtacaattctgcgatgctatgcgtgatgcaggcattgtaggcgtactgacattagataatcaggatcttaatgggaactggtacgatttcggtgatttcgtacaagtagcaccaggctgcggagttcctattgtggattcatattactcattgctgatgcccatcctcactttgactagggcattggctgctgagtcccatatggatgctgatctcgcaaaaccacttattaagtgggatttgctgaaatatgattttacggaagagagactttgtctcttcgaccgttattttaaatattgggaccagacataccatcccaattgtattaactgtttggatgataggtgtatccttcattgtgcaaactttaatgtgttattttctactgtgtttccacctacaagttttggaccactagtaagaaaaatatttgtagatggtgttccttttgttgtttcaactggataccattttcgtgagttaggagtcgtacataatcaggatgtaaacttacatagctcgcgtctcagtttcaaggaacttttagtgtatgctgctgatccagctatgcatgcagcttctggcaatttattgctagataaacgcactacatgcttttcagtagctgcactaacaaacaatgttgcttttcaaactgtcaaacccggtaattttaataaagacttttatgactttgctgtgtctaaaggtttctttaaggaaggaagttctgttgaactaaaacacttcttctttgctcaggatggcaacgctgctatcagtgattatgactattatcgttataatctgccaacaatgtgtgatatcagacaactcctattcgtagttgaagttgttgataaatactttgattgttacgatggtggctgtattaatgccaaccaagtaatcgttaacaatctggataaatcagctggtttcccatttaataaatggggtaaggctagactttattatgactcaatgagttatgaggatcaagatgcacttttcgcgtatactaagcgtaatgtcatccctactataactcaaatgaatcttaagtatgccattagtgcaaagaatagagctcgcaccgtagctggtgtctctatctgtagtactatgacaaatagacagtttcatcagaaattattgaagtcaatagccgccactagaggagctactgtggtaattggaacaagcaagttttacggtggctggcataatatgttaaaaactgtttacagtgatgtagaaactccacaccttatgggttgggattatccaaaatgtgacagagccatgcctaacatgcttaggataatggcctctcttgttcttgctcgcaaacataacacttgctgtaacttatcacaccgtttctacaggttagctaacgagtgtgcgcaagtattaagtgagatggtcatgtgtggcggctcactatatgttaaaccaggtggaacatcatccggtgatgctacaactgcttatgctaatagtgtctttaacatttgtcaagctgttacagccaatgtaaatgcacttctttcaactgatggtaataagatagctgacaagtatgtccgcaatctacaacacaggctctatgagtgtctctatagaaatagggatgttgatcatgaattcgtggatgagttttacgcttacctgcgtaaacatttctccatgatgattctttctgatgatgccgttgtgtgctataacagtaactatgcggctcaaggtttagtagctagcattaagaactttaaggcagttctttattatcaaaataatgtgttcatgtctgaggcaaaatgttggactgagactgaccttactaaaggacctcacgaattttgctcacagcatacaatgctagttaaacaaggagatgattacgtgtacctgccttacccagatccatcaagaatattaggcgcaggctgttttgtcgatgatattgtcaaaacagatggtacacttatgattgaaaggttcgtgtcactggctattgatgcttacccacttacaaaacatcctaatcaggagtatgctgatgtctttcacttgtatttacaatacattagaaagttacatgatgagcttactggccacatgttggacatgtattccgtaatgctaactaatgataacacctcacggtactgggaacctgagttttatgaggctatgtacacaccacatacagtcttgcaggctgtaggtgcttgtgtattgtgcaattcacagacttcacttcgttgcggtgcctgtattaggagaccattcctatgttgcaagtgctgctatgaccatgtcatttcaacatcacacaaattagtgttgtctgttaatccctatgtttgcaatgccccaggttgtgatgtcactgatgtgacacaactgtatctaggaggtatgagctattattgcaagtcacataagcctcccattagttttccattatgtgctaatggtcaggtttttggtttatacaaaaacacatgtgtaggcagtgacaatgtcactgacttcaatgcgatagcaacatgtgattggactaatgctggcgattacatacttgccaacacttgtactgagagactcaagcttttcgcagcagaaacgctcaaagccactgaggaaacatttaagctgtcatatggtattgccactgtacgcgaagtactctctgacagagaattgcatctttcatgggaggttggaaaacctagaccaccattgaacagaaactatgtctttactggttaccgtgtaactaaaaatagtaaagtacagattggagagtacacctttgaaaaaggtgactatggtgatgctgttgtgtacagaggtactacgacatacaagttgaatgttggtgattactttgtgttgacatctcacactgtaatgccacttagtgcacctactctagtgccacaagagcactatgtgagaattactggcttgtacccaacactcaacatctcagatgagttttctagcaatgttgcaaattatcaaaaggtcggcatgcaaaagtactctacactccaaggaccacctggtactggtaagagtcattttgccatcggacttgctctctattacccatctgctcgcatagtgtatacggcatgctctcatgcagctgttgatgccctatgtgaaaaggcattaaaatatttgcccatagataaatgtagtagaatcatacctgcgcgtgcgcgcgtagagtgttttgataaattcaaagtgaattcaacactagaacagtatgttttctgcactgtaaatgcattgccagaaacaactgctgacattgtagtctttgatgaaatctctatggctactaattatgacttgagtgttgtcaatgctagacttcgtgcaaaacactacgtctatattggcgatcctgctcaattaccagccccccgcacattgctgactaaaggcacactagaaccagaatattttaattcagtgtgcagacttatgaaaacaataggtccagacatgttccttggaacttgtcgccgttgtcctgctgaaattgttgacactgtgagtgctttagtttatgacaataagctaaaagcacacaaggataagtcagctcaatgcttcaaaatgttctacaaaggtgttattacacatgatgtttcatctgcaatcaacagacctcaaataggcgttgtaagagaatttcttacacgcaatcctgcttggagaaaagctgtttttatctcaccttataattcacagaacgctgtagcttcaaaaatcttaggattgcctacgcagactgttgattcatcacagggttctgaatatgactatgtcatattcacacaaactactgaaacagcacactcttgtaatgtcaaccgcttcaatgtggctatcacaagggcaaaaattggcattttgtgcataatgtctgatagagatctttatgacaaactgcaatttacaagtctagaaataccacgtcgcaatgtggctacattacaagcagaaaatgtaactggactttttaaggactgtagtaagatcattactggtcttcatcctacacaggcacctacacacctcagcgttgatataaagttcaagactgaaggattatgtgttgacataccaggcataccaaaggacatgacctaccgtagactcatctctatgatgggtttcaaaatgaattaccaagtcaatggttaccctaatatgtttatcacccgcgaagaagctattcgtcacgttcgtgcgtggattggctttgatgtagagggctgtcatgcaactagagatgctgtgggtactaacctacctctccagctaggattttctacaggtgttaacttagtagctgtaccgactggttatgttgacactgaaaataacacagaattcaccagagttaatgcaaaacctccaccaggtgaccagtttaaacatcttataccactcatgtataaaggcttgccctggaatgtagtgcgtattaagatagtacaaatgctcagtgatacactgaaaggattgtcagacagagtcgtgttcgtcctttgggcgcatggctttgagcttacatcaatgaagtactttgtcaagattggacctgaaagaacgtgttgtctgtgtgacaaacgtgcaacttgcttttctacttcatcagatacttatgcctgctggaatcattctgtgggttttgactatgtctataacccatttatgattgatgttcagcagtggggctttacgggtaaccttcagagtaaccatgaccaacattgccaggtacatggaaatgcacatgtggctagttgtgatgctatcatgactagatgtttagcagtccatgagtgctttgttaagcgcgttgattggtctgttgaataccctattataggagatgaactgagggttaattctgcttgcagaaaagtacaacacatggttgtgaagtctgcattgcttgctgataagtttccagttcttcatgacattggaaatccaaaggctatcaagtgtgtgcctcaggctgaagtagaatggaagttctacgatgctcagccatgtagtgacaaagcttacaaaatagaggaactcttctattcttatgctacacatcacgataaattcactgatggtgtttgtttgttttggaattgtaacgttgatcgttacccagccaatgcaattgtgtgtaggtttgacacaagagtcttgtcaaacttgaacttaccaggctgtgatggtggtagtttgtatgtgaataagcatgcattccacactccagctttcgataaaagtgcatttactaatttaaagcaattgcctttcttttactattctgatagtccttgtgagtctcatggcaaacaagtagtgtcggatattgactatgttccactcaaatctgctacgtgtattacacgatgcaatttaggtggtgctgtttgcagacaccatgcaaatgagtaccgacagtacttggatgcatataatatgatgatttctgctggatttagcctatggatttacaaacaatttgatacttataacctgtggaatacatttaccaggttacagagtttagaaaatgtggcttataatgttgttaataaaggacactttgatggacacgccggcgaagcacctgtttccatcattaataatgctgtttacacaaaggtagatggtattgatgtggagatctttgaaaataagacaacacttcctgttaatgttgcatttgagctttgggctaagcgtaacattaaaccagtgccagagattaagatactcaataatttgggtgttgatatcgctgctaatactgtaatctgggactacaaaagagaagccccagcacatgtatctacaataggtgtctgcacaatgactgacattgccaagaaacctactgagagtgcttgttcttcacttactgtcttgtttgatggtagagtggaaggacaggtagacctttttagaaacgcccgtaatggtgttttaataacagaaggttcagtcaaaggtctaacaccttcaaagggaccagcacaagctagcgtcaatggagtcacattaattggagaatcagtaaaaacacagtttaactactttaagaaagtagacggcattattcaacagttgcctgaaacctactttactcagagcagagacttagaggattttaagcccagatcacaaatggaaactgactttctcgagctcgctatggatgaattcatacagcgatataagctcgagggctatgccttcgaacacatcgtttatggagatttcagtcatggacaacttggcggtcttcatttaatgataggcttagccaagcgctcacaagattcaccacttaaattagaggattttatccctatggacagcacagtgaaaaattacttcataacagatgcgcaaacaggttcatcaaaatgtgtgtgttctgtgattgatcttttacttgatgactttgtcgagataataaagtcacaagatttgtcagtgatttcaaaagtggtcaaggttacaattgactatgctgaaatttcattcatgctttggtgtaaggatggacatgttgaaaccttctacccaaaactacaagcaagtcaagcgtggcaaccaggtgttgcgatgcctaacttgtacaagatgcaaagaatgcttcttgaaaagtgtgaccttcagaattatggtgaaaatgctgttataccaaaaggaataatgatgaatgtcgcaaagtatactcaactgtgtcaatacttaaatacacttactttagctgtaccctacaacatgagagttattcactttggtgctggctctgataaaggagttgcaccaggtacagctgtgctcagacaatggttgccaactggcacactacttgtcgattcagatcttaatgacttcgtctccgacgcagattctactttaattggagactgtgcaacagtacatacggctaataaatgggaccttattattagcgatatgtatgaccctaggaccaaacatgtgacaaaagagaatgactctaaagaagggtttttcacttatctgtgtggatttataaagcaaaaactagccctgggtggttctatagctgtaaagataacagagcattcttggaatgctgacctttacaagcttatgggccatttctcatggtggacagcttttgttacaaatgtaaatgcatcatcatcggaagcatttttaattggggctaactatcttggcaagccgaaggaacaaattgatggctataccatgcatgctaactacattttctggaggaacacaaatcctatccagttgtcttcctattcactctttgacatgagcaaatttcctcttaaattaagaggaactgctgtaatgtctcttaaggagaatcaaatcaatgatatgatttattctcttctggaaaaaggtaggcttatcattagagaaaacaacagagttgtggtttcaagtgatattcttgttaacaactaaacgaacatgtttattttcttattatttcttactctcactagtggtagtgaccttgaccggtgcaccacttttgatgatgttcaagctcctaattacactcaacatacttcatctatgaggggggtttactatcctgatgaaatttttagatcagacactctttatttaactcaggatttatttcttccattttattctaatgttacagggtttcatactattaatcatacgtttggcaaccctgtcataccttttaaggatggtatttattttgctgccacagagaaatcaaatgttgtccgtggttgggtttttggttctaccatgaacaacaagtcacagtcggtgattattattaacaattctactaatgttgttatacgagcatgtaactttgaattgtgtgacaaccctttctttgctgtttctaaacccatgggtacacagacacatactatgatattcgataatgcatttaattgcactttcgagtacatatctgatgccttttcgcttgatgtttcagaaaagtcaggtaattttaaacacttacgagagtttgtgtttaaaaataaagatgggtttctctatgtttataagggctatcaacctatagatgtagttcgtgatctaccttctggttttaacactttgaaacctatttttaagttgcctcttggtattaacattacaaattttagagccattcttacagccttttcacctgctcaagacatttggggcacgtcagctgcagcctattttgttggctatttaaagccaactacatttatgctcaagtatgatgaaaatggtacaatcacagatgctgttgattgttctcaaaatccacttgctgaactcaaatgctctgttaagagctttgagattgacaaaggaatttaccagacctctaatttcagggttgttccctcaggagatgttgtgagattccctaatattacaaacttgtgtccttttggagaggtttttaatgctactaaattcccttctgtctatgcatgggagagaaaaaaaatttctaattgtgttgctgattactctgtgctctacaactcaacatttttttcaacctttaagtgctatggcgtttctgccactaagttgaatgatctttgcttctccaatgtctatgcagattcttttgtagtcaagggagatgatgtaagacaaatagcgccaggacaaactggtgttattgctgattataattataaattgccagatgatttcatgggttgtgtccttgcttggaatactaggaacattgatgctacttcaactggtaattataattataaatataggtatcttagacatggcaagcttaggccctttgagagagacatatctaatgtgcctttctcccctgatggcaaaccttgcaccccacctgctcttaattgttattggccattaaatgattatggtttttacaccactactggcattggctaccaaccttacagagttgtagtactttcttttgaacttttaaatgcaccggccacggtttgtggaccaaaattatccactgaccttattaagaaccagtgtgtcaattttaattttaatggactcactggtactggtgtgttaactccttcttcaaagagatttcaaccatttcaacaatttggccgtgatgtttctgatttcactgattccgttcgagatcctaaaacatctgaaatattagacatttcaccttgctcttttgggggtgtaagtgtaattacacctggaacaaatgcttcatctgaagttgctgttctatatcaagatgttaactgcactgatgtttctacagcaattcatgcagatcaactcacaccagcttggcgcatatattctactggaaacaatgtattccagactcaagcaggctgtcttataggagctgagcatgtcgacacttcttatgagtgcgacattcctattggagctggcatttgtgctagttaccatacagtttctttattacgtagtactagccaaaaatctattgtggcttatactatgtctttaggtgctgatagttcaattgcttactctaataacaccattgctatacctactaacttttcaattagcattactacagaagtaatgcctgtttctatggctaaaacctccgtagattgtaatatgtacatctgcggagattctactgaatgtgctaatttgcttctccaatatggtagcttttgcacacaactaaatcgtgcactctcaggtattgctgctgaacaggatcgcaacacacgtgaagtgttcgctcaagtcaaacaaatgtacaaaaccccaactttgaaatattttggtggttttaatttttcacaaatattacctgaccctctaaagccaactaagaggtcttttattgaggacttgctctttaataaggtgacactcgctgatgctggcttcatgaagcaatatggcgaatgcctaggtgatattaatgctagagatctcatttgtgcgcagaagttcaatggacttacagtgttgccacctctgctcactgatgatatgattgctgcctacactgctgctctagttagtggtactgccactgctggatggacatttggtgctggcgctgctcttcaaataccttttgctatgcaaatggcatataggttcaatggcattggagttacccaaaatgttctctatgagaaccaaaaacaaatcgccaaccaatttaacaaggcgattagtcaaattcaagaatcacttacaacaacatcaactgcattgggcaagctgcaagacgttgttaaccagaatgctcaagcattaaacacacttgttaaacaacttagctctaattttggtgcaatttcaagtgtgctaaatgatatcctttcgcgacttgataaagtcgaggcggaggtacaaattgacaggttaattacaggcagacttcaaagccttcaaacctatgtaacacaacaactaatcagggctgctgaaatcagggcttctgctaatcttgctgctactaaaatgtctgagtgtgttcttggacaatcaaaaagagttgacttttgtggaaagggctaccaccttatgtccttcccacaagcagccccgcatggtgttgtcttcctacatgtcacgtatgtgccatcccaggagaggaacttcaccacagcgccagcaatttgtcatgaaggcaaagcatacttccctcgtgaaggtgtttttgtgtttaatggcacttcttggtttattacacagaggaacttcttttctccacaaataattactacagacaatacatttgtctcaggaaattgtgatgtcgttattggcatcattaacaacacagtttatgatcctctgcaacctgagcttgactcattcaaagaagagctggacaagtacttcaaaaatcatacatcaccagatgttgatcttggcgacatttcaggcattaacgcttctgtcgtcaacattcaaaaagaaattgaccgcctcaatgaggtcgctaaaaatttaaatgaatcactcattgaccttcaagaattgggaaaatatgagcaatatattaaatggccttggtatgtttggctcggcttcattgctggactaattgccatcgtcatggttacaatcttgctttgttgcatgactagttgttgcagttgcctcaagggtgcatgctcttgtggttcttgctgcaagtttgatgaggatgactctgagccagttctcaagggtgtcaaattacattacacataaacgaacttatggatttgtttatgagattttttactcttggatcaattactgcacagccagtaaaaattgacaatgcttctcctgcaagtactgttcatgctacagcaacgataccgctacaagcctcactccctttcggatggcttgttattggcgttgcatttcttgctgtttttcagagcgctaccaaaataattgcgctcaataaaagatggcagctagccctttataagggcttccagttcatttgcaatttactgctgctatttgttaccatctattcacatcttttgcttgtcgctgcaggtatggaggcgcaatttttgtacctctatgccttgatatattttctacaatgcatcaacgcatgtagaattattatgagatgttggctttgttggaagtgcaaatccaagaacccattactttatgatgccaactactttgtttgctggcacacacataactatgactactgtataccatataacagtgtcacagatacaattgtcgttactgaaggtgacggcatttcaacaccaaaactcaaagaagactaccaaattggtggttattctgaggataggcactcaggtgttaaagactatgtcgttgtacatggctatttcaccgaagtttactaccagcttgagtctacacaaattactacagacactggtattgaaaatgctacattcttcatctttaacaagcttgttaaagacccaccgaatgtgcaaatacacacaatcgacggctcttcaggagttgctaatccagcaatggatccaatttatgatgagccgacgacgactactagcgtgcctttgtaagcacaagaaagtgagtacgaacttatgtactcattcgtttcggaagaaacaggtacgttaatagttaatagcgtacttctttttcttgctttcgtggtattcttgctagttacactagccatccttactgcgcttcgattgtgtgcgtactgctgcaatattgttaacgtgagtttagtaaaaccaacggtttacgtctactcgcgtgttaaaaatctgaactcttctgaaggagttcctgatcttctggtctaaacgaactaactattattattattctgtttggaactttaacattgcttatcatggcagacaacggtactattaccgttgaggagcttaaacaactcctggaacaatggaacctagtaataggtttcctatgcctagcctggattatgttactacaatttgcctattctaatcggaacaggtttttgtacataataaagcttgttttcctctggctcttgtggccagtaacacttgcttgttttgtgcttgctgctgtctacagaattaattgggtgactggcgggattgcgattgcaatggcttgtattgtaggcttgatgtggcttagctacttcgttgcttccttcaggctgtttgctcgtacccgctcaatgtggtcattcaacccagaaacaaacattcttctcaatgtgcctctccgggggacaattgtgaccagaccgctcatggaaagtgaacttgtcattggtgctgtgatcattcgtggtcacttgcgaatggccggacactccctagggcgctgtgacattaaggacctgccaaaagagatcactgtggctacatcacgaacgctttcttattacaaattaggagcgtcgcagcgtgtaggcactgattcaggttttgctgcatacaaccgctaccgtattggaaactataaattaaatacagaccacgccggtagcaacgacaatattgctttgctagtacagtaagtgacaacagatgtttcatcttgttgacttccaggttacaatagcagagatattgattatcattatgaggactttcaggattgctatttggaatcttgacgttaataagttcaatagtgagacaattatttaagcctctaactaagaagaattattcggagttagatgatgaagaacctatggagttagattatccataaaacgaacatgaaaattattctcttcctgacattgattgtatttacatcttgcgagctatatcactatcaggagtgtgttagaggtacgactgtactactaaaagaaccttgcccatcaggaacatacgagggcaattcaccatttcaccctcttgctgacaataaatttgcactaacttgcactagcacacactttgcttttgcttgtgctgacggtactcgacatacctatcagctgcgtgcaagatcagtttcaccaaaacttttcatcagacaagaggaggttcaacaagagctctactcgccactttttctcattgttgctgctctagtatttttaatactttgcttcaccattaagagaaagacagaatgaatgagctcactttaattgacttctatttgtgctttttagcctttctgctattccttgttttaataatgcttattatattttggttttcactcgaaatccaggatctagaagaaccttgtaccaaagtctaaacgaacatgaaacttctcattgttttgacttgtatttctttatgcagttgcatatgcactgtagtacagcgctgtgcatctaataaacctcatgtgcttgaagatccttgtaaggtacaacactaggggtaatacttatagcactgcttggctttgtgctctaggaaaggttttaccttttcatagatggcacactatggttcaaacatgcacacctaatgttactatcaactgtcaagatccagctggtggtgcgcttatagctaggtgttggtaccttcatgaaggtcaccaaactgctgcatttagagacgtacttgttgttttaaataaacgaacaaattaaaatgtctgataatggaccccaatcaaaccaacgtagtgccccccgcattacatttggtggacccacagattcaactgacaataaccagaatggaggacgcaatggggcaaggccaaaacagcgccgaccccaaggtttacccaataatactgcgtcttggttcacagctctcactcagcatggcaaggaggaacttagattccctcgaggccagggcgttccaatcaacaccaatagtggtccagatgaccaaattggctactaccgaagagctacccgacgagttcgtggtggtgacggcaaaatgaaagagctcagccccagatggtacttctattacctaggaactggcccagaagcttcacttccctacggcgctaacaaagaaggcatcgtatgggttgcaactgagggagccttgaatacacccaaagaccacattggcacccgcaatcctaataacaatgctgccaccgtgctacaacttcctcaaggaacaacattgccaaaaggcttctacgcagagggaagcagaggcggcagtcaagcctcttctcgctcctcatcacgtagtcgcggtaattcaagaaattcaactcctggcagcagtaggggaaattctcctgctcgaatggctagcggaggtggtgaaactgccctcgcgctattgctgctagacagattgaaccagcttgagagcaaagtttctggtaaaggccaacaacaacaaggccaaactgtcactaagaaatctgctgctgaggcatctaaaaagcctcgccaaaaacgtactgccacaaaacagtacaacgtcactcaagcatttgggagacgtggtccagaacaaacccaaggaaatttcggggaccaagacctaatcagacaaggaactgattacaaacattggccgcaaattgcacaatttgctccaagtgcctctgcattctttggaatgtcacgcattggcatggaagtcacaccttcgggaacatggctgacttatcatggagccattaaattggatgacaaagatccacaattcaaagacaacgtcatactgctgaacaagcacattgacgcatacaaaacattcccaccaacagagcctaaaaaggacaaaaagaaaaagactgatgaagctcagcctttgccgcagagacaaaagaagcagcccactgtgactcttcttcctgcggctgacatggatgatttctccagacaacttcaaaattccatgagtggagcttctgctgattcaactcaggcataaacactcatgatgaccacacaaggcagatgggctatgtaaacgttttcgcaattccgtttacgatacatagtctactcttgtgcagaatgaattctcgtaactaaacagcacaagtaggtttagttaactttaatctcacatagcaatctttaatcaatgtgtaacattagggaggacttgaaagagccaccacattttcatcgaggccacgcggagtacgatcgagggtacagtgaataatgctagggagagctgcctatatggaagagccctaatgtgtaaaattaattttagtagtgctatccccatgtgattttaatagcttcttaggagaatgac

SEQ ID NO: 29782 - DNA, 29727 bp, SARS Coronavirus
atattaggtttttacctacccaggaaaagccaaccaacctcgatctcttgtagatctgttctctaaacgaactttaaaatctgtgtagctgtcgctcggctgcatgcctagtgcacctacgcagtataaacaataataaattttactgtcgttgacaagaaacgagtaactcgtccctcttctgcagactgcttacggtttcgtccgtgttgcagtcgatcatcagcatacctaggtttcgtccgggtgtgaccgaaaggtaagatggagagccttgttcttggtgtcaacgagaaaacacacgtccaactcagtttgcctgtccttcaggttagagacgtgctagtgcgtggcttcggggactctgtggaagaggccctatcggaggcacgtgaacacctcaaaaatggcacttgtggtctagtagagctggaaaaaggcgtactgccccagcttgaacagccctatgtgttcattaaacgttctgatgccttaagcaccaatcacggccacaaggtcgttgagctggttgcagaaatggacggcattcagtacggtcgtagcggtataacactgggagtactcgtgccacatgtgggcgaaaccccaattgcataccgcaatgttcttcttcgtaagaacggtaataagggagccggtggtcatagctatggcatcgatctaaagtcttatgacttaggtgacgagcttggcactgatcccattgaagattatgaacaaaactggaacactaagcatggcagtggtgcactccgtgaactcactcgtgagctcaatggaggtgcagtcactcgctatgtcgacaacaatttctgtggcccagatgggtaccctcttgattgcatcaaagattttctcgcacgcgcgggcaagtcaatgtgcactctttccgaacaacttgattacatcgagtcgaagagaggtgtctactgctgccgtgaccatgagcatgaaattgcctggttcactgagcgctctgataagagctacgagcaccagacacccttcgaaattaagagtgccaagaaatttgacactttcaaaggggaatgcccaaagtttgtgtttcctcttaactcaaaagtcaaagtcattcaaccacgtgttgaaaagaaaaagactgagggtttcatggggcgtatacgctctgtgtaccctgttgcatctccacaggagtgtaacaatatgcacttgtctaccttgatgaaatgtaatcattgcgatgaagtttcatggcagacgtgcgactttctgaaagccacttgtgaacattgtggcactgaaaatttagttattgaaggacctactacatgtgggtacctacctactaatgctgtagtgaaaatgccatgtcctgcctgtcaagacccagagattggacctgagcatagtgttgcagattatcacaaccactcaaacattgaaactcgactccgcaagggaggtaggactagatgttttggaggctgtgtgtttgcctatgttggctgctataataagcgtgcctactgggttcctcgtgctagtgctgatattggctcaggccatactggcattactggtgacaatgtggagaccttgaatgaggatctccttgagatactgagtcgtgaacgtgttaacattaacattgttggcgattttcatttgaatgaagaggttgccatcattttggcatctttctctgcttctacaagtgcctttattgacactataaagagtcttgattacaagtctttcaaaaccattgttgagtcctgcggtaactataaagttaccaagggaaagcccgtaaaaggtgcttggaacattggacaacagagatcagttttaacaccactgtgtggttttccctcacaggctgctggtgttatcagatcaatttttgcgcgcacacttgatgcagcaaaccactcaattcctgatttgcaaagagcagctgtcaccatacttgatggtatttctgaacagtcattacgtcttgtcgacgccatggtttatacttcagacctgctcaccaacagtgtcattattatggcatatgtaactggtggtcttgtacaacagacttctcagtggttgtctaatcttttgggcactactgttgaaaaactcaggcctatctttgaatggattgaggcgaaacttagtgcaggagttgaatttctcaaggatgcttgggagattctcaaatttctcattacaggtgtttttgacatcgtcaagggtcaaatacaggttgcttcagataacatcaaggattgtgtaaaatgcttcattgatgttgttaacaaggcactcgaaatgtgcattgatcaagtcactatcgctggcgcaaagttgcgatcactcaacttaggtgaagtcttcatcgctcaaagcaagggactttaccgtcagtgtatacgtggcaaggagcagctgcaactactcatgcctcttaaggcaccaaaagaagtaacctttcttgaaggtgattcacatgacacagtacttacctctgaggaggttgttctcaagaacggtgaactcgaagcactcgagacgcccgttgatagcttcacaaatggagctatcgttggcacaccagtctgtgtaaatggcctcatgctcttagagattaaggacaaagaacaatactgcgcattgtctcctggtttactggctacaaacaatgtctttcgcttaaaagggggtgcaccaattaaaggtgtaacctttggagaagatactgtttgggaagttcaaggttacaagaatgtgagaatcacatttgagcttgatgaacgtgttgacaaagtgcttaatgaaaagtgctctgtctacactgttgaatccggtaccgaagttactgagtttgcatgtgttgtagcagaggctgttgtgaagactttacaaccagtttctgatctccttaccaacatgggtattgatcttgatgagtggagtgtagctacattctacttatttgatgatgctggtgaagaaaacttttcatcacgtatgtattgttccttttaccctccagatgaggaagaagaggacgatgcagagtgtgaggaagaagaaattgatgaaacctgtgaacatgagtacggtacagaggatgattatcaaggtctccctctggaatttggtgcctcagctgaaacagttcgagttgaggaagaagaagaggaagactggctggatgatactactgagcaatcagagattgagccagaaccagaacctacacctgaagaaccagttaatcagtttactggttatttaaaacttactgacaatgttgccattaaatgtgttgacatcgttaaggaggcacaaagtgctaatcctatggtgattgtaaatgctgctaacatacacctgaaacatggtggtggtgtagcaggtgcactcaacaaggcaaccaatggtgccatgcaaaaggagagtgatgattacattaagctaaatggccctcttacagtaggagggtcttgtttgctttctggacataatcttgctaagaagtgtctgcatgttgttggacctaacctaaatgcaggtgaggacatccagcttcttaaggcagcatatgaaaatttcaattcacaggacatcttacttgcaccattgttgtcagcaggcatatttggtgctaaaccacttcagtctttacaagtgtgcgtgcagacggttcgtacacaggtttatattgcagtcaatgacaaagctctttatgagcaggttgtcatggattatcttgataacctgaagcctagagtggaagcacctaaacaagaggagccaccaaacacagaagattccaaaactgaggagaaatccgtcgtacagaagcctgtcgatgtgaagccaaaaattaaggcctgcattgatgaggttaccacaacactggaagaaactaagtttcttaccaataagttactcttgtttgctgatatcaatggtaagctttaccatgattctcagaacatgcttagaggtgaagatatgtctttccttgagaaggatgcaccttacatggtaggtgatgttatcactagtggtgatatcacttgtgttgtaataccctccaaaaaggctggtggcactactgagatgctctcaagagctttgaagaaagtgccagttgatgagtatataaccacgtaccctggacaaggatgtgctggttatacacttgaggaagctaagactgctcttaagaaatgcaaatctgcattttatgtactaccttcagaagcacctaatgctaaggaagagattctaggaactgtatcctggaatttgagagaaatgcttgctcatgctgaagagacaagaaaattaatgcctatatgcatggatgttagagccataatggcaaccatccaacgtaagtataaaggaattaaaattcaagagggcatcgttgactatggtgtccgattcttcttttatactagtaaagagcctgtagcttctattattacgaagctgaactctctaaatgagccgcttgtcacaatgccaattggttatgtgacacatggttttaatcttgaagaggctgcgcgctgtatgcgttctcttaaagctcctgccgtagtgtcagtatcatcaccagatgctgttactacatataatggatacctcacttcgtcatcaaagacatctgaggagcactttgtagaaacagtttctttggctggctcttacagagattggtcctattcaggacagcgtacagagttaggtgttgaatttcttaagcgtggtgacaaaattgtgtaccacactctggagagccccgtcgagtttcatcttgacggtgaggttctttcacttgacaaactaaagagtctcttatccctgcgggaggttaagactataaaagtgttcacaactgtggacaacactaatctccacacacagcttgtggatatgtctatgacatatggacagcagtttggtccaacatacttggatggtgctgatgttacaaaaattaaacctcatgtaaatcatgagggtaagactttctttgtactacctagtgatgacacactacgtagtgaagctttcgagtactaccatactcttgatgagagttttcttggtaggtacatgtctgctttaaaccacacaaagaaatggaaatttcctcaagttggtggtttaacttcaattaaatgggctgataacaattgttatttgtctagtgttttattagcacttcaacagcttgaagtcaaattcaatgcaccagcacttcaagaggcttattatagagcccgtgctggtgatgctgctaacttttgtgcactcatactcgcttacagtaataaaactgttggcgagcttggtgatgtcagagaaactatgacccatcttctacagcatgctaatttggaatctgcaaagcgagttcttaatgtggtgtgtaaacattgtggtcagaaaactactaccttaacgggtgtagaagctgtgatgtatatgggtactctatcttatgataatcttaagacaggtgtttccattccatgtgtgtgtggtcgtgatgctacacaatatctagtacaacaagagtcttcttttgttatgatgtctgcaccacctgctgagtataaattacagcaaggtacattcttatgtgcgaatgagtacactggtaactatcagtgtggtcattacactcatataactgctaaggagaccctctatcgtattgacggagctcaccttacaaagatgtcagagtacaaaggaccagtgactgatgttttctacaaggaaacatcttacactacaaccatcaagcctgtgtcgtataaactcgatggagttacttacacagagattgaaccaaaattggatgggtattataaaaaggataatgcttactatacagagcagcctatagaccttgtaccaactcaaccattaccaaatgcgagttttgataatttcaaactcacatgttctaacacaaaatttgctgatgatttaaatcaaatgacaggcttcacaaagccagcttcacgagagctatctgtcacattcttcccagacttgaatggcgatgtagtggctattgactatagacactattcagcgagtttcaagaaaggtgctaaattactgcataagccaattgtttggcacattaaccaggctacaaccaagacaacgttcaaaccaaacacttggtgtttacgttgtctttggagtacaaagccagtagatacttcaaattcatttgaagttctggcagtagaagacacacaaggaatggacaatcttgcttgtgaaagtcaacaacccacctctgaagaagtagtggaaaatcctaccatacagaaggaagtcatagagtgtgacgtgaaaactaccgaagttgtaggcaatgtcatacttaaaccatcagatgaaggtgttaaagtaacacaagagttaggtcatgaggatcttatggctgcttatgtggaaaacacaagcattaccattaagaaacctaatgagctttcactagccttaggtttaaaaacaattgccactcatggtattgctgcaattaatagtgttccttggagtaaaattttggcttatgtcaaaccattcttaggacaagcagcaattacaacatcaaattgcgctaagagattagcacaacgtgtgtttaacaattatatgccttatgtgtttacattattgttccaattgtgtacttttactaaaagtaccaattctagaattagagcttcactacctacaactattgctaaaaatagtgttaagagtgttgctaaattatgtttggatgccggcattaattatgtgaagtcacccaaattttctaaattgttcacaatcgctatgtggctattgttgttaagtatttgcttaggttctctaatctgtgtaactgctgcttttggtgtactcttatctaattttggtgctccttcttattgtaatggcgttagagaattgtatcttaattcgtctaacgttactactatggatttctgtgaaggttcttttccttgcagcatttgtttaagtggattagactcccttgattcttatccagctcttgaaaccattcaggtgacgatttcatcgtacaagctagacttgacaattttaggtctggccgctgagtgggttttggcatatatgttgttcacaaaattcttttatttattaggtctttcagctataatgcaggtgttctttggctattttgctagtcatttcatcagcaattcttggctcatgtggtttatcattagtattgtacaaatggcacccgtttctgcaatggttaggatgtacatcttctttgcttctttctactacatatggaagagctatgttcatatcatggatggttgcacctcttcgacttgcatgatgtgctataagcgcaatcgtgccacacgcgttgagtgtacaactattgttaatggcatgaagagatctttctatgtctatgcaaatggaggccgtggcttctgcaagactcacaattggaattgtctcaattgtgacacattttgcactggtagtacattcattagtgatgaagttgctcgtgatttgtcactccagtttaaaagaccaatcaaccctactgaccagtcatcgtatattgttgatagtgttgctgtgaaaaatggcgcgcttcacctctactttgacaaggctggtcaaaagacctatgagagacatccgctctcccattttgtcaatttagacaatttgagagctaacaacactaaaggttcactgcctattaatgtcatagtttttgatggcaagtccaaatgcgacgagtctgcttctaagtctgcttctgtgtactacagtcagctgatgtgccaacctattctgttgcttgaccaagctcttgtatcagacgttggagatagtactgaagtttccgttaagatgtttgatgcttatgtcgacaccttttcagcaacttttagtgttcctatggaaaaacttaaggcacttgttgctacagctcacagcgagttagcaaagggtgtagctttagatggtgtcctttctacattcgtgtcagctgcccgacaaggtgttgttgataccgatgttgacacaaaggatgttattgaatgtctcaaactttcacatcactctgacttagaagtgacaggtgacagttgtaacaatttcatgctcacctataataaggttgaaaacatgacgcccagagatcttggcgcatgtattgactgtaatgcaaggcatatcaatgcccaagtagcaaaaagtcacaatgtttcactcatctggaatgtaaaagactacatgtctttatctgaacagctgcgtaaacaaattcgtagtgctgccaagaagaacaacataccttttagactaacttgtgctacaactagacaggttgtcaatgtcataactactaaaatctcactcaagggtggtaagattgttagtacttgttttaaacttatgcttaaggccacattattgtgcgttcttgctgcattggtttgttatatcgttatgccagtacatacattgtcaatccatgatggttacacaaatgaaatcattggttacaaagccattcaggatggtgtcactcgtgacatcatttctactgatgattgttttgcaaataaacatgctggttttgacgcatggtttagccagcgtggtggttcatacaaaaatgacaaaagctgccctgtagtagctgctatcattacaagagagattggtttcatagtgcctggcttaccgggtactgtgctgagagcaatcaatggtgacttcttgcattttctacctcgtgtttttagtgctgttggcaacatttgctacacaccttccaaactcattgagtatagtgattttgctacctctgcttgcgttcttgctgctgagtgtacaatttttaaggatgctatgggcaaacctgtgccatattgttatgacactaatttgctagagggttctatttcttatagtgagcttcgtccagacactcgttatgtgcttatggatggttccatcatacagtttcctaacacttacctggagggttctgttagagtagtaacaacttttgatgctgagtactgtagacatggtacatgcgaaaggtcagaagtaggtatttgcctatctaccagtggtagatgggttcttaataatgagcattacagagctctatcaggagttttctgtggtgttgatgcgatgaatctcatagctaacatctttactcctcttgtgcaacctgtgggtgctttagatgtgtctgcttcagtagtggctggtggtattattgccatattggtgacttgtgctgcctactactttatgaaattcagacgtgtttttggtgagtacaaccatgttgttgctgctaatgcacttttgtttttgatgtctttcactatactctgtctggtaccagcttacagctttctgccgggagtctactcagtcttttacttgtacttgacattctatttcaccaatgatgtttcattcttggctcaccttcaatggtttgccatgttttctcctattgtgcctttttggataacagcaatctatgtattctgtatttctctgaagcactgccattggttctttaacaactatcttaggaaaagagtcatgtttaatggagttacatttagtaccttcgaggaggctgctttgtgtacctttttgctcaacaaggaaatgtacctaaaattgcgtagcgagacactgttgccacttacacagtataacaggtatcttgctctatataacaagtacaagtatttcagtggagccttagatactaccagctatcgtgaagcagcttgctgccacttagcaaaggctctaaatgactttagcaactcaggtgctgatgttctctaccaaccaccacagacatcaatcacttctgctgttctgcagagtggttttaggaaaatggcattcccgtcaggcaaagttgaagggtgcatggtacaagtaacctgtggaactacaactcttaatggattgtggttggatgacacagtatactgtccaagacatgtcatttgcacagcagaagacatgcttaatcctaactatgaagatctgctcattcgcaaatccaaccatagctttcttgttcaggctggcaatgttcaacttcgtgttattggccattctatgcaaaattgtctgcttaggcttaaagttgatacttctaaccctaagacacccaagtataaatttgtccgtatccaacctggtcaaacattttcagttctagcatgctacaatggttcaccatctggtgtttatcagtgtgccatgagacctaatcataccattaaaggttctttccttaatggatcatgtggtagtgttggttttaacattgattatgattgcgtgtctttctgctatatgcatcatatggagcttccaacaggagtacacgctggtactgacttagaaggtaaattctatggtccatttgttgacagacaaactgcacaggctgcaggtacagacacaaccataacattaaatgttttggcatggctgtatgctgctgttatcaatggtgataggtggtttcttaatagattcaccactactttgaatgactttaaccttgtggcaatgaagtacaactatgaacctttgacacaagatcatgttgacatattgggacctctttctgctcaaacaggaattgccgtcttagatatgtgtgctgctttgaaagagctgctgcagaatggtatgaatggtcgtactatccttggtagcactattttagaagatgagtttacaccatttgatgttgttagacaatgctctggtgttaccttccaaggtaagttcaagaaaattgttaagggcactcatcattggatgcttttaactttcttgacatcactattgattcttgttcaaagtacacagtggtcactgtttttctttgtttacgagaatgctttcttgccatttactcttggtattatggcaattgctgcatgtgctatgctgcttgttaagcataagcacgcattcttgtgcttgtttctgttaccttctcttgcaacagttgcttactttaatatggtctacatgcctgctagctgggtgatgcgtatcatgacatggcttgaattggctgacactagcttgtctggttataggcttaaggattgtgttatgtatgcttcagctttagttttgcttattctcatgacagctcgcactgtttatgatgatgctgctagacgtgtttggacactgatgaatgtcattacacttgtttacaaagtctactatggtaatgctttagatcaagctatttccatgtgggccttagttatttctgtaacctctaactattctggtgtcgttacgactatcatgtttttagctagagctatagtgtttgtgtgtgttgagtattatccattgttatttattactggcaacaccttacagtgtatcatgcttgtttattgtttcttaggctattgttgctgctgctactttggccttttctgtttactcaaccgttacttcaggcttactcttggtgtttatgactacttggtctctacacaagaatttaggtatatgaactcccaggggcttttgcctcctaagagtagtattgatgctttcaagcttaacattaagttgttgggtattggaggtaaaccatgtatcaaggttgctactgtacagtctaaaatgtctgacgtaaagtgcacatctgtggtactgctctcggttcttcaacaacttagagtagagtcatcttctaaattgtgggcacaatgtgtacaactccacaatgatattcttcttgcaaaagacacaactgaagctttcgagaagatggtttctcttttgtctgttttgctatccatgcagggtgctgtagacattaataggttgtgcgaggaaatgctcgataaccgtgctactcttcaggctattgcttcagaatttagttctttaccatcatatgccgcttatgccactgcccaggaggcctatgagcaggctgtagctaatggtgattctgaagtcgttctcaaaaagttaaagaaatctttgaatgtggctaaatctgagtttgaccgtgatgctgccatgcaacgcaagttggaaaagatggcagatcaggctatgacccaaatgtacaaacaggcaagatctgaggacaagagggcaaaagtaactagtgctatgcaaacaatgctcttcactatgcttaggaagcttgataatgatgcacttaacaacattatcaacaatgcgcgtgatggttgtgttccactcaacatcataccattgactacagcagccaaactcatggttgttgtccctgattatggtacctacaagaacacttgtgatggtaacacctttacatatgcatctgcactctgggaaatccagcaagttgttgatgcggatagcaagattgttcaacttagtgaaattaacatggacaattcaccaaatttggcttggcctcttattgttacagctctaagagccaactcagctgttaaactacagaataatgaactgagtccagtagcactacgacagatgtcctgtgcggctggtaccacacaaacagcttgtactgatgacaatgcacttgcctactataacaattcgaagggaggtaggtttgtgctggcattactatcagaccaccaagatctcaaatgggctagattccctaagagtgatggtacaggtacaatttacacagaactggaaccaccttgtaggtttgttacagacacaccaaaagggcctaaagtgaaatacttgtacttcatcaaaggcttaaacaacctaaatagaggtatggtgctgggcagtttagctgctacagtacgtcttcaggctggaaatgctacagaagtacctgccaattcaactgtgctttccttctgtgcttttgcagtagaccctgctaaagcatataaggattacctagcaagtggaggacaaccaatcaccaactgtgtgaagatgttgtgtacacacactggtacaggacaggcaattactgtaacaccagaagctaacatggaccaagagtcctttggtggtgcttcatgttgtctgtattgtagatgccacattgaccatccaaatcctaaaggattctgtgacttgaaaggtaagtacgtccaaatacctaccacttgtgctaatgacccagtgggttttacacttagaaacacagtctgtaccgtctgcggaatgtggaaaggttatggctgtagttgtgaccaactccgcgaacccttgatgcagtctgcggatgcatcaacgtttttaaacgggtttgcggtgtaagtgcagcccgtcttacaccgtgcggcacaggcactagtactgatgtcgtctacagggcttttgatatttacaacgaaaaagttgctggttttgcaaagttcctaaaaactaattgctgtcgcttccaggagaaggatgaggaaggcaatttattagactcttactttgtagttaagaggcatactatgtctaactaccaacatgaagagactatttataacttggttaaagattgtccagcggttgctgtccatgactttttcaagtttagagtagatggtgacatggtaccacatatatcacgtcagcgtctaactaaatacacaatggctgatttagtctatgctctacgtcattttgatgagggtaattgtgatacattaaaagaaatactcgtcacatacaattgctgtgatgatgattatttcaataagaaggattggtatgacttcgtagagaatcctgacatcttacgcgtatatgctaacttaggtgagcgtgtacgccaatcattattaaagactgtacaattctgcgatgctatgcgtgatgcaggcattgtaggcgtactgacattagataatcaggatcttaatgggaactggtacgatttcggtgatttcgtacaagtagcaccaggctgcggagttcctattgtggattcatattactcattgctgatgcccatcctcactttgactagggcattggctgctgagtcccatatggatgctgatctcgcaaaaccacttattaagtgggatttgctgaaatatgattttacggaagagagactttgtctcttcgaccgttattttaaatattgggaccagacataccatcccaattgtattaactgtttggatgataggtgtatccttcattgtgcaaactttaatgtgttattttctactgtgtttccacctacaagttttggaccactagtaagaaaaatatttgtagatggtgttccttttgttgtttcaactggataccattttcgtgagttaggagtcgtacataatcaggatgtaaacttacatagctcgcgtctcagtttcaaggaacttttagtgtatgctgctgatccagctatgcatgcagcttctggcaatttattgctagataaacgcactacatgcttttcagtagctgcactaacaaacaatgttgcttttcaaactgtcaaacccggtaattttaataaagacttttatgactttgctgtgtctaaaggtttctttaaggaaggaagttctgttgaactaaaacacttcttctttgctcaggatggcaacgctgctatcagtgattatgactattatcgttataatctgccaacaatgtgtgatatcagacaactcctattcgtagttgaagttgttgataaatactttgattgttacgatggtggctgtattaatgccaaccaagtaatcgttaacaatctggataaatcagctggtttcccatttaataaatggggtaaggctagactttattatgactcaatgagttatgaggatcaagatgcacttttcgcgtatactaagcgtaatgtcatccctactataactcaaatgaatcttaagtatgccattagtgcaaagaatagagctcgcaccgtagctggtgtctctatctgtagtactatgacaaatagacagtttcatcagaaattattgaagtcaatagccgccactagaggagctactgtggtaattggaacaagcaagttttacggtggctggcataatatgttaaaaactgtttacagtgatgtagaaactccacaccttatgggttgggattatccaaaatgtgacagagccatgcctaacatgcttaggataatggcctctcttgttcttgctcgcaaacataacacttgctgtaacttatcacaccgtttctacaggttagctaacgagtgtgcgcaagtattaagtgagatggtcatgtgtggcggctcactatatgttaaaccaggtggaacatcatccggtgatgctacaactgcttatgctaatagtgtctttaacatttgtcaagctgttacagccaatgtaaatgcacttctttcaactgatggtaataagatagctgacaagtatgtccgcaatctacaacacaggctctatgagtgtctctatagaaatagggatgttgatcatgaattcgtggatgagttttacgcttacctgcgtaaacatttctccatgatgattctttctgatgatgccgttgtgtgctataacagtaactatgcggctcaaggtttagtagctagcattaagaactttaaggcagttctttattatcaaaataatgtgttcatgtctgaggcaaaatgttggactgagactgaccttactaaaggacctcacgaattttgctcacagcatacaatgctagttaaacaaggagatgattacgtgtacctgccttacccagatccatcaagaatattaggcgcaggctgttttgtcgatgatattgtcaaaacagatggtacacttatgattgaaaggttcgtgtcactggctattgatgcttacccacttacaaaacatcctaatcaggagtatgctgatgtctttcacttgtatttacaatacattagaaagttacatgatgagcttactggccacatgttggacatgtattccgtaatgctaactaatgataacacctcacggtactgggaacctgagttttatgaggctatgtacacaccacatacagtcttgcaggctgtaggtgcttgtgtattgtgcaattcacagacttcacttcgttgcggtgcctgtattaggagaccattcctatgttgcaagtgctgctatgaccatgtcatttcaacatcacacaaattagtgttgtctgttaatccctatgtttgcaatgccccaggttgtgatgtcactgatgtgacacaactgtatctaggaggtatgagctattattgcaagtcacataagcctcccattagttttccattatgtgctaatggtcaggtttttggtttatacaaaaacacatgtgtaggcagtgacaatgtcactgacttcaatgcgatagcaacatgtgattggactaatgctggcgattacatacttgccaacacttgtactgagagactcaagcttttcgcagcagaaacgctcaaagccactgaggaaacatttaagctgtcatatggtattgccactgtacgcgaagtactctctgacagagaattgcatctttcatgggaggttggaaaacctagaccaccattgaacagaaactatgtctttactggttaccgtgtaactaaaaatagtaaagtacagattggagagtacacctttgaaaaaggtgactatggtgatgctgttgtgtacagaggtactacgacatacaagttgaatgttggtgattactttgtgttgacatctcacactgtaatgccacttagtgcacctactctagtgccacaagagcactatgtgagaattactggcttgtacccaacactcaacatctcagatgagttttctagcaatgttgcaaattatcaaaaggtcggcatgcaaaagtactctacactccaaggaccacctggtactggtaagagtcattttgccatcggacttgctctctattacccatctgctcgcatagtgtatacggcatgctctcatgcagctgttgatgccctatgtgaaaaggcattaaaatatttgcccatagataaatgtagtagaatcatacctgcgcgtgcgcgcgtagagtgttttgataaattcaaagtgaattcaacactagaacagtatgttttctgcactgtaaatgcattgccagaaacaactgctgacattgtagtctttgatgaaatctctatggctactaattatgacttgagtgttgtcaatgctagacttcgtgcaaaacactacgtctatattggcgatcctgctcaattaccagccccccgcacattgctgactaaaggcacactagaaccagaatattttaattcagtgtgcagacttatgaaaacaataggtccagacatgttccttggaacttgtcgccgttgtcctgctgaaattgttgacactgtgagtgctttagtttatgacaataagctaaaagcacacaaggataagtcagctcaatgcttcaaaatgttctacaaaggtgttattacacatgatgtttcatctgcaatcaacagacctcaaataggcgttgtaagagaatttcttacacgcaatcctgcttggagaaaagctgtttttatctcaccttataattcacagaacgctgtagcttcaaaaatcttaggattgcctacgcagactgttgattcatcacagggttctgaatatgactatgtcatattcacacaaactactgaaacagcacactcttgtaatgtcaaccgcttcaatgtggctatcacaagggcaaaaattggcattttgtgcataatgtctgatagagatctttatgacaaactgcaatttacaagtctagaaataccacgtcgcaatgtggctacattacaagcagaaaatgtaactggactttttaaggactgtagtaagatcattactggtcttcatcctacacaggcacctacacacctcagcgttgatataaagttcaagactgaaggattatgtgttgacataccaggcataccaaaggacatgacctaccgtagactcatctctatgatgggtttcaaaatgaattaccaagtcaatggttaccctaatatgtttatcacccgcgaagaagctattcgtcacgttcgtgcgtggattggctttgatgtagagggctgtcatgcaactagagatgctgtgggtactaacctacctctccagctaggattttctacaggtgttaacttagtagctgtaccgactggttatgttgacactgaaaataacacagaattcaccagagttaatgcaaaacctccaccaggtgaccagtttaaacatcttataccactcatgtataaaggcttgccctggaatgtagtgcgtattaagatagtacaaatgctcagtgatacactgaaaggattgtcagacagagtcgtgttcgtcctttgggcgcatggctttgagcttacatcaatgaagtactttgtcaagattggacctgaaagaacgtgttgtctgtgtgacaaacgtgcaacttgcttttctacttcatcagatacttatgcctgctggaatcattctgtgggttttgactatgtctataacccatttatgattgatgttcagcagtggggctttacgggtaaccttcagagtaaccatgaccaacattgccaggtacatggaaatgcacatgtggctagttgtgatgctatcatgactagatgtttagcagtccatgagtgctttgttaagcgcgttgattggtctgttgaataccctattataggagatgaactgagggttaattctgcttgcagaaaagtacaacacatggttgtgaagtctgcattgcttgctgataagtttccagttcttcatgacattggaaatccaaaggctatcaagtgtgtgcctcaggctgaagtagaatggaagttctacgatgctcagccatgtagtgacaaagcttacaaaatagaggaactcttctattcttatgctacacatcacgataaattcactgatggtgtttgtttgttttggaattgtaacgttgatcgttacccagccaatgcaattgtgtgtaggtttgacacaagagtcttgtcaaacttgaacttaccaggctgtgatggtggtagtttgtatgtgaataagcatgcattccacactccagctttcgataaaagtgcatttactaatttaaagcaattgcctttcttttactattctgatagtccttgtgagtctcatggcaaacaagtagtgtcggatattgattatgttccactcaaatctgctacgtgtattacacgatgcaatttaggtggtgctgtttgcagacaccatgcaaatgagtaccgacagtacttggatgcatataatatgatgatttctgctggatttagcctatggatttacaaacaatttgatacttataacctgtggaatacatttaccaggttacagagtttagaaaatgtggcttataatgttgttaataaaggacactttgatggacacgccggcgaagcacctgtttccatcattaataatgctgtttacacaaaggtagatggtattgatgtggagatctttgaaaataagacaacacttcctgttaatgttgcatttgagctttgggctaagcgtaacattaaaccagtgccagagattaagatactcaataatttgggtgttgatatcgctgctaatactgtaatctgggactacaaaagagaagccccagcacatgtatctacaataggtgtctgcacaatgactgacattgccaagaaacctactgagagtgcttgttcttcacttactgtcttgtttgatggtagagtggaaggacaggtagacctttttagaaacgcccgtaatggtgttttaataacagaaggttcagtcaaaggtctaacaccttcaaagggaccagcacaagctagcgtcaatggagtcacattaattggagaatcagtaaaaacacagtttaactactttaagaaagtagacggcattattcaacagttgcctgaaacctactttactcagagcagagacttagaggattttaagcccagatcacaaatggaaactgactttctcgagctcgctatggatgaattcatacagcgatataagctcgagggctatgccttcgaacacatcgtttatggagatttcagtcatggacaacttggcggtcttcatttaatgataggcttagccaagcgctcacaagattcaccacttaaattagaggattttatccctatggacagcacagtgaaaaattacttcataacagatgcgcaaacaggttcatcaaaatgtgtgtgttctgtgattgatcttttacttgatgactttgtcgagataataaagtcacaagatttgtcagtgatttcaaaagtggtcaaggttacaattgactatgctgaaatttcattcatgctttggtgtaaggatggacatgttgaaaccttctacccaaaactacaagcaagtcaagcgtggcaaccaggtgttgcgatgcctaacttgtacaagatgcaaagaatgcttcttgaaaagtgtgaccttcagaattatggtgaaaatgctgttataccaaaaggaataatgatgaatgtcgcaaagtatactcaactgtgtcaatacttaaatacacttactttagctgtaccctacaacatgagagttattcactttggtgctggctctgataaaggagttgcaccaggtacagctgtgctcagacaatggttgccaactggcacactacttgtcgattcagatcttaatgacttcgtctccgacgcagattctactttaattggagactgtgcaacagtacatacggctaataaatgggaccttattattagcgatatgtatgaccctaggaccaaacatgtgacaaaagagaatgactctaaagaagggtttttcacttatctgtgtggatttataaagcaaaaactagccctgggtggttctatagctgtaaagataacagagcattcttggaatgctgacctttacaagcttatgggccatttctcatggtggacagcttttgttacaaatgtaaatgcatcatcatcggaagcatttttaattggggctaactatcttggcaagccgaaggaacaaattgatggctataccatgcatgctaactacattttctggaggaacacaaatcctatccagttgtcttcctattcactctttgacatgagcaaatttcctcttaaattaagaggaactgctgtaatgtctcttaaggagaatcaaatcaatgatatgatttattctcttctggaaaaaggtaggcttatcattagagaaaacaacagagttgtggtttcaagtgatattcttgttaacaactaaacgaacatgtttattttcttattatttcttactctcactagtggtagtgaccttgaccggtgcaccacttttgatgatgttcaagctcctaattacactcaacatacttcatctatgaggggggtttactatcctgatgaaatttttagatcagacactctttatttaactcaggatttatttcttccattttattctaatgttacagggtttcatactattaatcatacgtttggcaaccctgtcataccttttaaggatggtatttattttgctgccacagagaaatcaaatgttgtccgtggttgggtttttggttctaccatgaacaacaagtcacagtcggtgattattattaacaattctactaatgttgttatacgagcatgtaactttgaattgtgtgacaaccctttctttgctgtttctaaacccatgggtacacagacacatactatgatattcgataatgcatttaattgcactttcgagtacatatctgatgccttttcgcttgatgtttcagaaaagtcaggtaattttaaacacttacgagagtttgtgtttaaaaataaagatgggtttctctatgtttataagggctatcaacctatagatgtagttcgtgatctaccttctggttttaacactttgaaacctatttttaagttgcctcttggtattaacattacaaattttagagccattcttacagccttttcacctgctcaagacatttggggcacgtcagctgcagcctattttgttggctatttaaagccaactacatttatgctcaagtatgatgaaaatggtacaatcacagatgctgttgattgttctcaaaatccacttgctgaactcaaatgctctgttaagagctttgagattgacaaaggaatttaccagacctctaatttcagggttgttccctcaggagatgttgtgagattccctaatattacaaacttgtgtccttttggagaggtttttaatgctactaaattcccttctgtctatgcatgggagagaaaaaaaatttctaattgtgttgctgattactctgtgctctacaactcaacatttttttcaacctttaagtgctatggcgtttctgccactaagttgaatgatctttgcttctccaatgtctatgcagattcttttgtagtcaagggagatgatgtaagacaaatagcgccaggacaaactggtgttattgctgattataattataaattgccagatgatttcatgggttgtgtccttgcttggaatactaggaacattgatgctacttcaactggtaattataattataaatataggtatcttagacatggcaagcttaggccctttgagagagacatatctaatgtgcctttctcccctgatggcaaaccttgcaccccacctgctcttaattgttattggccattaaatgattatggtttttacaccactactggcattggctaccaaccttacagagttgtagtactttcttttgaacttttaaatgcaccggccacggtttgtggaccaaaattatccactgaccttattaagaaccagtgtgtcaattttaattttaatggactcactggtactggtgtgttaactccttcttcaaagagatttcaaccatttcaacaatttggccgtgatgtttctgatttcactgattccgttcgagatcctaaaacatctgaaatattagacatttcaccttgctcttttgggggtgtaagtgtaattacacctggaacaaatgcttcatctgaagttgctgttctatatcaagatgttaactgcactgatgtttctacagcaattcatgcagatcaactcacaccagcttggcgcatatattctactggaaacaatgtattccagactcaagcaggctgtcttataggagctgagcatgtcgacacttcttatgagtgcgacattcctattggagctggcatttgtgctagttaccatacagtttctttattacgtagtactagccaaaaatctattgtggcttatactatgtctttaggtgctgatagttcaattgcttactctaataacaccattgctatacctactaacttttcaattagcattactacagaagtaatgcctgtttctatggctaaaacctccgtagattgtaatatgtacatctgcggagattctactgaatgtgctaatttgcttctccaatatggtagcttttgcacacaactaaatcgtgcactctcaggtattgctgctgaacaggatcgcaacacacgtgaagtgttcgctcaagtcaaacaaatgtacaaaaccccaactttgaaatattttggtggttttaatttttcacaaatattacctgaccctctaaagccaactaagaggtcttttattgaggacttgctctttaataaggtgacactcgctgatgctggcttcatgaagcaatatggcgaatgcctaggtgatattaatgctagagatctcatttgtgcgcagaagttcaatggacttacagtgttgccacctctgctcactgatgatatgattgctgcctacactgctgctctagttagtggtactgccactgctggatggacatttggtgctggcgctgctcttcaaataccttttgctatgcaaatggcatataggttcaatggcattggagttacccaaaatgttctctatgagaaccaaaaacaaatcgccaaccaatttaacaaggcgattagtcaaattcaagaatcacttacaacaacatcaactgcattgggcaagctgcaagacgttgttaaccagaatgctcaagcattaaacacacttgttaaacaacttagctctaattttggtgcaatttcaagtgtgctaaatgatatcctttcgcgacttgataaagtcgaggcggaggtacaaattgacaggttaattacaggcagacttcaaagccttcaaacctatgtaacacaacaactaatcagggctgctgaaatcagggcttctgctaatcttgctgctactaaaatgtctgagtgtgttcttggacaatcaaaaagagttgacttttgtggaaagggctaccaccttatgtccttcccacaagcagccccgcatggtgttgtcttcctacatgtcacgtatgtgccatcccaggagaggaacttcaccacagcgccagcaatttgtcatgaaggcaaagcatacttccctcgtgaaggtgtttttgtgtttaatggcacttcttggtttattacacagaggaacttcttttctccacaaataattactacagacaatacatttgtctcaggaaattgtgatgtcgttattggcatcattaacaacacagtttatgatcctctgcaacctgagcttgactcattcaaagaagagctggacaagtacttcaaaaatcatacatcaccagatgttgatcttggcgacatttcaggcattaacgcttctgtcgtcaacattcaaaaagaaattgaccgcctcaatgaggtcgctaaaaatttaaatgaatcactcattgaccttcaagaattgggaaaatatgagcaatatattaaatggccttggtatgtttggctcggcttcattgctggactaattgccatcgtcatggttacaatcttgctttgttgcatgactagttgttgcagttgcctcaagggtgcatgctcttgtggttcttgctgcaagtttgatgaggatgactctgagccagttctcaagggtgtcaaattacattacacataaacgaacttatggatttgtttatgagattttttactcttggatcaattactgcacagccagtaaaaattgacaatgcttctcctgcaagtactgttcatgctacagcaacgataccgctacaagcctcactccctttcggatggcttgttattggcgttgcatttcttgctgtttttcagagcgctaccaaaataattgcgctcaataaaagatggcagctagccctttataagggcttccagttcatttgcaatttactgctgctatttgttaccatctattcacatcttttgcttgtcgctgcaggtatggaggcgcaatttttgtacctctatgccttgatatattttctacaatgcatcaacgcatgtagaattattatgagatgttggttttgttggaagtgcaaatccaagaacccattactttatgatgccaactactttgtttgctggcacacacataactatgactactgtataccatataacagtgtcacagatacaattgtcgttactgaaggtgacggcatttcaacaccaaaactcaaagaagactaccaaattggtggttattctgaggataggcactcaggtgttaaagactatgtcgttgtacatggctatttcaccgaagtttactaccagcttgagtctacacaaattactacagacactggtattgaaaatgctacattcttcatctttaacaagcttgttaaagacccaccgaatgtgcaaatacacacaatcgacggctcttcaggagttgctaatccagcaatggatccaatttatgatgagccgacgacgactactagcgtgcctttgtaagcacaagaaagtgagtacgaacttatgtactcattcgtttcggaagaaacaggtacgttaatagttaatagcgtacttctttttcttgctttcgtggtattcttgctagttacactagccatccttactgcgcttcgattgtgtgcgtactgctgcaatattgttaacgtgagtttagtaaaaccaacggtttacgtctactcgcgtgttaaaaatctgaactcttctgaaggagttcctgatcttctggtctaaacgaactaactattattattattctgtttggaactttaacattgcttatcatggcagacaacggtactattaccgttgaggagcttaaacaactcctggaacaatggaacctagtaataggtttcctatgcctagcctggattatgttactacaatttgcctattctaatcggaacaggtttttgtacataataaagcttgttttcctctggctcttgtggccagtaacacttgcttgttttgtgcttgctgctgtctacagaattaattgggtgactggcgggattgcgattgcaatggcttgtattgtaggcttgatgtggcttagctacttcgttgcttccttcaggctgtttgctcgtacccgctcaatgtggtcattcaacccagaaacaaacattcttctcaatgtgcctctccgggggacaattgtgaccagaccgctcatggaaagtgaacttgtcattggtgctgtgatcattcgtggtcacttgcgaatggccggacactccctagggcgctgtgacattaaggacctgccaaaagagatcactgtggctacatcacgaacgctttcttattacaaattaggagcgtcgcagcgtgtaggcactgattcaggttttgctgcatacaaccgctaccgtattggaaactataaattaaatacagaccacgccggtagcaacgacaatattgctttgctagtacagtaagtgacaacagatgtttcatcttgttgacttccaggttacaatagcagagatattgattatcattatgaggactttcaggattgctatttggaatcttgacgttataataagttcaatagtgagacaattatttaagcctctaactaagaagaattattcggagttagatgatgaagaacctatggagttagattatccataaaacgaacatgaaaattattctcttcctgacattgattgtatttacatcttgcgagctatatcactatcaggagtgtgttagaggtacgactgtactactaaaagaaccttgcccatcaggaacatacgagggcaattcaccatttcaccctcttgctgacaataaatttgcactaacttgcactagcacacactttgcttttgcttgtgctgacggtactcgacatacctatcagctgcgtgcaagatcagtttcaccaaaacttttcatcagacaagaggaggttcaacaagagctctactcgccactttttctcattgttgctgctctagtatttttaatactttgcttcaccattaagagaaagacagaatgaatgagctcactttaattgacttctatttgtgctttttagcctttctgctattccttgttttaataatgcttattatattttggttttcactcgaaatccaggatctagaagaaccttgtaccaaagtctaaacgaacatgaaacttctcattgttttgacttgtatttctttatgcagttgcatatgcactgtagtacagcgctgtgcatctaataaacctcatgtgcttgaagatccttgtaaggtacaacactaggggtaatacttatagcactgcttggctttgtgctctaggaaaggttttaccttttcatagatggcacactatggttcaaacatgcacacctaatgttactatcaactgtcaagatccagctggtggtgcgcttatagctaggtgttggtaccttcatgaaggtcaccaaactgctgcatttagagacgtacttgttgttttaaataaacgaacaaattaaaatgtctgataatggaccccaatcaaaccaacgtagtgccccccgcattacatttggtggacccacagattcaactgacaataaccagaatggaggacgcaatggggcaaggccaaaacagcgccgaccccaaggtttacccaataatactgcgtcttggttcacagctctcactcagcatggtaaggaggaacttagattccctcgaggccagggcgttccaatcaacaccaatagtggtccagatgaccaaattggctactaccgaagagctacccgacgagttcgtggtggtgacggcaaaatgaaagagctcagccccagatggtacttctattacctaggaactggcccagaagcttcacttccctacggcgctaacaaagaaggcatcgtatgggttgcaactgagggagccttgaatacacccaaagaccacattggcacccgcaatcctaataacaatgctgccaccgtgctacaacttcctcaaggaacaacattgccaaaaggcttctacgcagagggaagcagaggcggcagtcaagcctcttctcgctcctcatcacgtagtcgcggtaattcaagaaattcaactcctggcagcagtaggggaaattctcctgctcgaatggctagcggaggtggtgaaactgccctcgcgctattgctgctagacagattgaaccagcttgagagcaaagtttctggtaaaggccaacaacaacaaggccaaactgtcactaagaaatctgctgctgaggcatctaaaaagcctcgccaaaaacgtactgccacaaaacagtacaacgtcactcaagcatttgggagacgtggtccagaacaaacccaaggaaatttcggggaccaagacctaatcagacaaggaactgattacaaacattggccgcaaattgcacaatttgctccaagtgcctctgcattctttggaatgtcacgcattggcatggaagtcacaccttcgggaacatggctgacttatcatggagccattaaattggatgacaaagatccacaattcaaagacaacgtcatactgctgaacaagcacattgacgcatacaaaacattcccaccaacagagcctaaaaaggacaaaaagaaaaagactgatgaagctcagcctttgccgcagagacaaaagaagcagcccactgtgactcttcttcctgcggctgacatggatgatttctccagacaacttcaaaattccatgagtggagcttctgctgattcaactcaggcataaacactcatgatgaccacacaaggcagatgggctatgtaaacgttttcgcaattccgtttacgatacatagtctactcttgtgcagaatgaattctcgtaactaaacagcacaagtaggtttagttaactttaatctcacatagcaatctttaatcaatgtgtaacattagggaggacttgaaagagccaccacattttcatcgaggccacgcggagtacgatcgagggtacagtgaataatgctagggagagctgcctatatggaagagccctaatgtgtaaaattaattttagtagtgctatccccatgtgattttaatagcttcttaggagaatgac

SEQ ID NO: 29783 - DNA, 29727 bp, SARS Coronavirus
atattaggtttttacctacccaggaaaagccaaccaacctcgatctcttgtagatctgttctctaaacgaactttaaaatctgtgtagctgtcgctcggctgcatgcctagtgcacctacgcagtataaacaataataaattttactgtcgttgacaagaaacgagtaactcgtccctcttctgcagactgcttacggtttcgtccgtgttgcagtcgatcatcagcatacctaggtttcgtccgggtgtgaccgaaaggtaagatggagagccttgttcttggtgtcaacgagaaaacacacgtccaactcagtttgcctgtccttcaggttagagacgtgctagtgcgtggcttcggggactctgtggaagaggccctatcggaggcacgtgaacacctcaaaaatggcacttgtggtctagtagagctggaaaaaggcgtactgccccagcttgaacagccctatgtgttcattaaacgttctgatgccttaagcaccaatcacggccacaaggtcgttgagctggttgcagaaatggacggcattcagtacggtcgtagcggtataacactgggagtactcgtgccacatgtgggcgaaaccccaattgcataccgcaatgttcttcttcgtaagaacggtaataagggagccggtggtcatagctatggcatcgatctaaagtcttatgacttaggtgacgagcttggcactgatcccattgaagattatgaacaaaactggaacactaagcatggcagtggtgcactccgtgaactcactcgtgagctcaatggaggtgcagtcactcgctatgtcgacaacaatttctgtggcccagatgggtaccctcttgattgcatcaaagattttctcgcacgcgcgggcaagtcaatgtgcactctttccgaacaacttgattacatcgagtcgaagagaggtgtctactgctgccgtgaccatgagcatgaaattgcctggttcactgagcgctctgataagagctacgagcaccagacacccttcgaaattaagagtgccaagaaatttgacactttcaaaggggaatgcccaaagtttgtgtttcctcttaactcaaaagtcaaagtcattcaaccacgtgttgaaaagaaaaagactgagggtttcatggggcgtatacgctctgtgtaccctgttgcatctccacaggagtgtaacaatatgcacttgtctaccttgatgaaatgtaatcattgcgatgaagtttcatggcagacgtgcgactttctgaaagccacttgtgaacattgtggcactgaaaatttagttattgaaggacctactacatgtgggtacctacctactaatgctgtagtgaaaatgccatgtcctgcctgtcaagacccagagattggacctgagcatagtgttgcagattatcacaaccactcaaacattgaaactcgactccgcaagggaggtaggactagatgttttggaggctgtgtgtttgcctatgttggctgctataataagcgtgcctactgggttcctcgtgctagtgctgatattggctcaggccatactggcattactggtgacaatgtggagaccttgaatgaggatctccttgagatactgagtcgtgaacgtgttaacattaacattgttggcgattttcatttgaatgaagaggttgccatcattttggcatctttctctgcttctacaagtgcctttattgacactataaagagtcttgattacaagtctttcaaaaccattgttgagtcctgcggtaactataaagttaccaagggaaagcccgtaaaaggtgcttggaacattggacaacagagatcagttttaacaccactgtgtggttttccctcacaggctgctggtgttatcagatcaatttttgcgcgcacacttgatgcagcaaaccactcaattcctgatttgcaaagagcagctgtcaccatacttgatggtatttctgaacagtcattacgtcttgtcgacgccatggtttatacttcagacctgctcaccaacagtgtcattattatggcatatgtaactggtggtcttgtacaacagacttctcagtggttgtctaatcttttgggcactactgttgaaaaactcaggcctatctttgaatggattgaggcgaaacttagtgcaggagttgaatttctcaaggatgcttgggagattctcaaatttctcattacaggtgtttttgacatcgtcaagggtcaaatacaggttgcttcagataacatcaaggattgtgtaaaatgcttcattgatgttgttaacaaggcactcgaaatgtgcattgatcaagtcactatcgctggcgcaaagttgcgatcactcaacttaggtgaagtcttcatcgctcaaagcaagggactttaccgtcagtgtatacgtggcaaggagcagctgcaactactcatgcctcttaaggcaccaaaagaagtaacctttcttgaaggtgattcacatgacacagtacttacctctgaggaggttgttctcaagaacggtgaactcgaagcactcgagacgcccgttgatagcttcacaaatggagctatcgttggcacaccagtctgtgtaaatggcctcatgctcttagagattaaggacaaagaacaatactgcgcattgtctcctggtttactggctacaaacaatgtctttcgcttaaaagggggtgcaccaattaaaggtgtaacctttggagaagatactgtttgggaagttcaaggttacaagaatgtgagaatcacatttgagcttgatgaacgtgttgacaaagtgcttaatgaaaagtgctctgtctacactgttgaatccggtaccgaagttactgagtttgcatgtgttgtagcagaggctgttgtgaagactttacaaccagtttctgatctccttaccaacatgggtattgatcttgatgagtggagtgtagctacattctacttatttgatgatgctggtgaagaaaacttttcatcacgtatgtattgttccttttaccctccagatgaggaagaagaggacgatgcagagtgtgaggaagaagaaattgatgaaacctgtgaacatgagtacggtacagaggatgattatcaaggtctccctctggaatttggtgcctcagctgaaacagttcgagttgaggaagaagaagaggaagactggctggatgatactactgagcaatcagagattgagccagaaccagaacctacacctgaagaaccagttaatcagtttactggttatttaaaacttactgacaatgttgccattaaatgtgttgacatcgttaaggaggcacaaagtgctaatcctatggtgattgtaaatgctgctaacatacacctgaaacatggtggtggtgtagcaggtgcactcaacaaggcaaccaatggtgccatgcaaaaggagagtgatgattacattaagctaaatggccctcttacagtaggagggtcttgtttgctttctggacataatcttgctaagaagtgtctgcatgttgttggacctaacctaaatgcaggtgaggacatccagcttcttaaggcagcatatgaaaatttcaattcacaggacatcttacttgcaccattgttgtcagcaggcatatttggtgctaaaccacttcagtctttacaagtgtgcgtgcagacggttcgtacacaggtttatattgcagtcaatgacaaagctctttatgagcaggttgtcatggattatcttgataacctgaagcctagagtggaagcacctaaacaagaggagccaccaaacacagaagattccaaaactgaggagaaatccgtcgtacagaagcctgtcgatgtgaagccaaaaattaaggcctgcattgatgaggttaccacaacactggaagaaactaagtttcttaccaataagttactcttgtttgctgatatcaatggtaagctttaccatgattctcagaacatgcttagaggtgaagatatgtctttccttgagaaggatgcaccttacatggtaggtgatgttatcactagtggtgatatcacttgtgttgtaataccctccaaaaaggctggtggcactactgagatgctctcaagagctttgaagaaagtgccagttgatgagtatataaccacgtaccctggacaaggatgtgctggttatacacttgaggaagctaagactgctcttaagaaatgcaaatctgcattttatgtactaccttcagaagcacctaatgctaaggaagagattctaggaactgtatcctggaatttgagagaaatgcttgctcatgctgaagagacaagaaaattaatgcctatatgcatggatgttagagccataatggcaaccatccaacgtaagtataaaggaattaaaattcaagagggcatcgttgactatggtgtccgattcttcttttatactagtaaagagcctgtagcttctattattacgaagctgaactctctaaatgagccgcttgtcacaatgccaattggttatgtgacacatggttttaatcttgaagaggctgcgcgctgtatgcgttctcttaaagctcctgccgtagtgtcagtatcatcaccagatgctgttactacatataatggatacctcacttcgtcatcaaagacatctgaggagcactttgtagaaacagtttctttggctggctcttacagagattggtcctattcaggacagcgtacagagttaggtgttgaatttcttaagcgtggtgacaaaattgtgtaccacactctggagagccccgtcgagtttcatcttgacggtgaggttctttcacttgacaaactaaagagtctcttatccctgcgggaggttaagactataaaagtgttcacaactgtggacaacactaatctccacacacagcttgtggatatgtctatgacatatggacagcagtttggtccaacatacttggatggtgctgatgttacaaaaattaaacctcatgtaaatcatgagggtaagactttctttgtactacctagtgatgacacactacgtagtgaagctttcgagtactaccatactcttgatgagagttttcttggtaggtacatgtctgctttaaaccacacaaagaaatggaaatttcctcaagttggtggtttaacttcaattaaatgggctgataacaattgttatttgtctagtgttttattagcacttcaacagcttgaagtcaaattcaatgcaccagcacttcaagaggcttattatagagcccgtgctggtgatgctgctaacttttgtgcactcatactcgcttacagtaataaaactgttggcgagcttggtgatgtcagagaaactatgacccatcttctacagcatgctaatttggaatctgcaaagcgagttcttaatgtggtgtgtaaacattgtggtcagaaaactactaccttaacgggtgtagaagctgtgatgtatatgggtactctatcttatgataatcttaagacaggtgtttccattccatgtgtgtgtggtcgtgatgctacacaatatctagtacaacaagagtcttcttttgttatgatgtctgcaccacctgctgagtataaattacagcaaggtacattcttatgtgcgaatgagtacactggtaactatcagtgtggtcattacactcatataactgctaaggagaccctctatcgtattgacggagctcaccttacaaagatgtcagagtacaaaggaccagtgactgatgttttctacaaggaaacatcttacactacaaccatcaagcctgtgtcgtataaactcgatggagttacttacacagagattgaaccaaaattggatgggtattataaaaaggataatgcttactatacagagcagcctatagaccttgtaccaactcaaccattaccaaatgcgagttttgataatttcaaactcacatgttctaacacaaaatttgctgatgatttaaatcaaatgacaggcttcacaaagccagcttcacgagagctatctgtcacattcttcccagacttgaatggcgatgtagtggctattgactatagacactattcagcgagtttcaagaaaggtgctaaattactgcataagccaattgtttggcacattaaccaggctacaaccaagacaacgttcaaaccaaacacttggtgtttacgttgtctttggagtacaaagccagtagatacttcaaattcatttgaagttctggcagtagaagacacacaaggaatggacaatcttgcttgtgaaagtcaacaacccacctctgaagaagtagtggaaaatcctaccatacagaaggaagtcatagagtgtgacgtgaaaactaccgaagttgtaggcaatgtcatacttaaaccatcagatgaaggtgttaaagtaacacaagagttaggtcatgaggatcttatggctgcttatgtggaaaacacaagcattaccattaagaaacctaatgagctttcactagccttaggtttaaaaacaattgccactcatggtattgctgcaattaatagtgttccttggagtaaaattttggcttatgtcaaaccattcttaggacaagcagcaattacaacatcaaattgcgctaagagattagcacaacgtgtgtttaacaattatatgccttatgtgtttacattattgttccaattgtgtacttttactaaaagtaccaattctagaattagagcttcactacctacaactattgctaaaaatagtgttaagagtgttgctaaattatgtttggatgccggcattaattatgtgaagtcacccaaattttctaaattgttcacaatcgctatgtggctattgttgttaagtatttgcttaggttctctaatctgtgtaactgctgcttttggtgtactcttatctaattttggtgctccttcttattgtaatggcgttagagaattgtatcttaattcgtctaacgttactactatggatttctgtgaaggttcttttccttgcagcatttgtttaagtggattagactcccttgattcttatccagctcttgaaaccattcaggtgacgatttcatcgtacaagctagacttgacaattttaggtctggccgctgagtgggttttggcatatatgttgttcacaaaattcttttatttattaggtctttcagctataatgcaggtgttctttggctattttgctagtcatttcatcagcaattcttggctcatgtggtttatcattagtattgtacaaatggcacccgtttctgcaatggttaggatgtacatcttctttgcttctttctactacatatggaagagctatgttcatatcatggatggttgcacctcttcgacttgcatgatgtgctataagcgcaatcgtgccacacgcgttgagtgtacaactattgttaatggcatgaagagatctttctatgtctatgcaaatggaggccgtggcttctgcaagactcacaattggaattgtctcaattgtgacacattttgcactggtagtacattcattagtgatgaagttgctcgtgatttgtcactccagtttaaaagaccaatcaaccctactgaccagtcatcgtatattgttgatagtgttgctgtgaaaaatggcgcgcttcacctctactttgacaaggctggtcaaaagacctatgagagacatccgctctcccattttgtcaatttagacaatttgagagctaacaacactaaaggttcactgcctattaatgtcatagtttttgatggcaagtccaaatgcgacgagtctgcttctaagtctgcttctgtgtactacagtcagctgatgtgccaacctattctgttgcttgaccaagctcttgtatcagacgttggagatagtactgaagtttccgttaagatgtttgatgcttatgtcgacaccttttcagcaacttttagtgttcctatggaaaaacttaaggcacttgttgctacagctcacagcgagttagcaaagggtgtagctttagatggtgtcctttctacattcgtgtcagctgcccgacaaggtgttgttgataccgatgttgacacaaaggatgttattgaatgtctcaaactttcacatcactctgacttagaagtgacaggtgacagttgtaacaatttcatgctcacctataataaggttgaaaacatgacgcccagagatcttggcgcatgtattgactgtaatgcaaggcatatcaatgcccaagtagcaaaaagtcacaatgtttcactcatctggaatgtaaaagactacatgtctttatctgaacagctgcgtaaacaaattcgtagtgctgccaagaagaacaacataccttttagactaacttgtgctacaactagacaggttgtcaatgtcataactactaaaatctcactcaagggtggtaagattgttagtacttgttttaaacttatgcttaaggccacattattgtgcgttcttgctgcattggtttgttatatcgttatgccagtacatacattgtcaatccatgatggttacacaaatgaaatcattggttacaaagccattcaggatggtgtcactcgtgacatcatttctactgatgattgttttgcaaataaacatgctggttttgacgcatggtttagccagcgtggtggttcatacaaaaatgacaaaagctgccctgtagtagctgctatcattacaagagagattggtttcatagtgcctggcttaccgggtactgtgctgagagcaatcaatggtgacttcttgcattttctacctcgtgtttttagtgctgttggcaacatttgctacacaccttccaaactcattgagtatagtgattttgctacctctgcttgcgttcttgctgctgagtgtacaatttttaaggatgctatgggcaaacctgtgccatattgttatgacactaatttgctagagggttctatttcttatagtgagcttcgtccagacactcgttatgtgcttatggatggttccatcatacagtttcctaacacttacctggagggttctgttagagtagtaacaacttttgatgctgagtactgtagacatggtacatgcgaaaggtcagaagtaggtatttgcctatctaccagtggtagatgggttcttaataatgagcattacagagctctatcaggagttttctgtggtgttgatgcgatgaatctcatagctaacatctttactcctcttgtgcaacctgtgggtgctttagatgtgtctgcttcagtagtggctggtggtattattgccatattggtgacttgtgctgcctactactttatgaaattcagacgtgtttttggtgagtacaaccatgttgttgctgctaatgcacttttgtttttgatgtctttcactatactctgtctggtaccagcttacagctttctgccgggagtctactcagtcttttacttgtacttgacattctatttcaccaatgatgtttcattcttggctcaccttcaatggtttgccatgttttctcctattgtgcctttttggataacagcaatctatgtattctgtatttctctgaagcactgccattggttctttaacaactatcttaggaaaagagtcatgtttaatggagttacatttagtaccttcgaggaggctgctttgtgtacctttttgctcaacaaggaaatgtacctaaaattgcgtagcgagacactgttgccacttacacagtataacaggtatcttgctctatataacaagtacaagtatttcagtggagccttagatactaccagctatcgtgaagcagcttgctgccacttagcaaaggctctaaatgactttagcaactcaggtgctgatgttctctaccaaccaccacagacatcaatcacttctgctgttctgcagagtggttttaggaaaatggcattcccgtcaggcaaagttgaagggtgcatggtacaagtaacctgtggaactacaactcttaatggattgtggttggatgacacagtatactgtccaagacatgtcatttgcacagcagaagacatgcttaatcctaactatgaagatctgctcattcgcaaatccaaccatagctttcttgttcaggctggcaatgttcaacttcgtgttattggccattctatgcaaaattgtctgcttaggcttaaagttgatacttctaaccctaagacacccaagtataaatttgtccgtatccaacctggtcaaacattttcagttctagcatgctacaatggttcaccatctggtgtttatcagtgtgccatgagacctaatcataccattaaaggttctttccttaatggatcatgtggtagtgttggttttaacattgattatgattgcgtgtctttctgctatatgcatcatatggagcttccaacaggagtacacgctggtactgacttagaaggtaaattctatggtccatttgttgacagacaaactgcacaggctgcaggtacagacacaaccataacattaaatgttttggcatggctgtatgctgctgttatcaatggtgataggtggtttcttaatagattcaccactactttgaatgactttaaccttgtggcaatgaagtacaactatgaacctttgacacaagatcatgttgacatattgggacctctttctgctcaaacaggaattgccgtcttagatatgtgtgctgctttgaaagagctgctgcagaatggtatgaatggtcgtactatccttggtagcactattttagaagatgagtttacaccatttgatgttgttagacaatgctctggtgttaccttccaaggtaagttcaagaaaattgttaagggcactcatcattggatgcttttaactttcttgacatcactattgattcttgttcaaagtacacagtggtcactgtttttctttgtttacgagaatgctttcttgccatttactcttggtattatggcaattgctgcatgtgctatgctgcttgttaagcataagcacgcattcttgtgcttgtttctgttaccttctcttgcaacagttgcttactttaatatggtctacatgcctgctagctgggtgatgcgtatcatgacatggcttgaattggctgacactagcttgtctggttataggcttaaggattgtgttatgtatgcttcagctttagttttgcttattctcatgacagctcgcactgtttatgatgatgctgctagacgtgtttggacactgatgaatgtcattacacttgtttacaaagtctactatggtaatgctttagatcaagctatttccatgtgggccttagttatttctgtaacctctaactattctggtgtcgttacgactatcatgtttttagctagagctatagtgtttgtgtgtgttgagtattatccattgttatttattactggcaacaccttacagtgtatcatgcttgtttattgtttcttaggctattgttgctgctgctactttggccttttctgtttactcaaccgttacttcaggcttactcttggtgtttatgactacttggtctctacacaagaatttaggtatatgaactcccaggggcttttgcctcctaagagtagtattgatgctttcaagcttaacattaagttgttgggtattggaggtaaaccatgtatcaaggttgctactgtacagtctaaaatgtctgacgtaaagtgcacatctgtggtactgctctcggttcttcaacaacttagagtagagtcatcttctaaattgtgggcacaatgtgtacaactccacaatgatattcttcttgcaaaagacacaactgaagctttcgagaagatggtttctcttttgtctgttttgctatccatgcagggtgctgtagacattaataggttgtgcgaggaaatgctcgataaccgtgctactcttcaggctattgcttcagaatttagttctttaccatcatatgccgcttatgccactgcccaggaggcctatgagcaggctgtagctaatggtgattctgaagtcgttctcaaaaagttaaagaaatctttgaatgtggctaaatctgagtttgaccgtgatgctgccatgcaacgcaagttggaaaagatggcagatcaggctatgacccaaatgtacaaacaggcaagatctgaggacaagagggcaaaagtaactagtgctatgcaaacaatgctcttcactatgcttaggaagcttgataatgatgcacttaacaacattatcaacaatgcgcgtgatggttgtgttccactcaacatcataccattgactacagcagccaaactcatggttgttgtccctgattatggtacctacaagaacacttgtgatggtaacacctttacatatgcatctgcactctgggaaatccagcaagttgttgatgcggatagcaagattgttcaacttagtgaaattaacatggacaattcaccaaatttggcttggcctcttattgttacagctctaagagccaactcagctgttaaactacagaataatgaactgagtccagtagcactacgacagatgtcctgtgcggctggtaccacacaaacagcttgtactgatgacaatgcacttgcctactataacaattcgaagggaggtaggtttgtgctggcattactatcagaccaccaagatctcaaatgggctagattccctaagagtgatggtacaggtacaatttacacagaactggaaccaccttgtaggtttgttacagacacaccaaaagggcctaaagtgaaatacttgtacttcatcaaaggcttaaacaacctaaatagaggtatggtgctgggcagtttagctgctacagtacgtcttcaggctggaaatgctacagaagtacctgccaattcaactgtgctttccttctgtgcttttgcagtagaccctgctaaagcatataaggattacctagcaagtggaggacaaccaatcaccaactgtgtgaagatgttgtgtacacacactggtacaggacaggcaattactgtaacaccagaagctaacatggaccaagagtcctttggtggtgcttcatgttgtctgtattgtagatgccacattgaccatccaaatcctaaaggattctgtgacttgaaaggtaagtacgtccaaatacctaccacttgtgctaatgacccagtgggttttacacttagaaacacagtctgtaccgtctgcggaatgtggaaaggttatggctgtagttgtgaccaactccgcgaacccttgatgcagtctgcggatgcatcaacgtttttaaacgggtttgcggtgtaagtgcagcccgtcttacaccgtgcggcacaggcactagtactgatgtcgtctacagggcttttgatatttacaacgaaaaagttgctggttttgcaaagttcctaaaaactaattgctgtcgcttccaggagaaggatgaggaaggcaatttattagactcttactttgtagttaagaggcatactatgtctaactaccaacatgaagagactatttataacttggttaaagattgtccagcggttgctgtccatgactttttcaagtttagagtagatggtgacatggtaccacatatatcacgtcagcgtctaactaaatacacaatggctgatttagtctatgctctacgtcattttgatgagggtaattgtgatacattaaaagaaatactcgtcacatacaattgctgtgatgatgattatttcaataagaaggattggtatgacttcgtagagaatcctgacatcttacgcgtatatgctaacttaggtgagcgtgtacgccaatcattattaaagactgtacaattctgcgatgctatgcgtgatgcaggcattgtaggcgtactgacattagataatcaggatcttaatgggaactggtacgatttcggtgatttcgtacaagtagcaccaggctgcggagttcctattgtggattcatattactcattgctgatgcccatcctcactttgactagggcattggctgctgagtcccatatggatgctgatctcgcaaaaccacttattaagtgggatttgctgaaatatgattttacggaagagagactttgtctcttcgaccgttattttaaatattgggaccagacataccatcccaattgtattaactgtttggatgataggtgtatccttcattgtgcaaactttaatgtgttattttctactgtgtttccacctacaagttttggaccactagtaagaaaaatatttgtagatggtgttccttttgttgtttcaactggataccattttcgtgagttaggagtcgtacataatcaggatgtaaacttacatagctcgcgtctcagtttcaaggaacttttagtgtatgctgctgatccagctatgcatgcagcttctggcaatttattgctagataaacgcactacatgcttttcagtagctgcactaacaaacaatgttgcttttcaaactgtcaaacccggtaattttaataaagacttttatgactttgctgtgtctaaaggtttctttaaggaaggaagttctgttgaactaaaacacttcttctttgctcaggatggcaacgctgctatcagtgattatgactattatcgttataatctgccaacaatgtgtgatatcagacaactcctattcgtagttgaagttgttgataaatactttgattgttacgatggtggctgtattaatgccaaccaagtaatcgttaacaatctggataaatcagctggtttcccatttaataaatggggtaaggctagactttattatgactcaatgagttatgaggatcaagatgcacttttcgcgtatactaagcgtaatgtcatccctactataactcaaatgaatcttaagtatgccattagtgcaaagaatagagctcgcaccgtagctggtgtctctatctgtagtactatgacaaatagacagtttcatcagaaattattgaagtcaatagccgccactagaggagctactgtggtaattggaacaagcaagttttacggtggctggcataatatgttaaaaactgtttacagtgatgtagaaactccacaccttatgggttgggattatccaaaatgtgacagagccatgcctaacatgcttaggataatggcctctcttgttcttgctcgcaaacataacacttgctgtaacttatcacaccgtttctacaggttagctaacgagtgtgcgcaagtattaagtgagatggtcatgtgtggcggctcactatatgttaaaccaggtggaacatcatccggtgatgctacaactgcttatgctaatagtgtctttaacatttgtcaagctgttacagccaatgtaaatgcacttctttcaactgatggtaataagatagctgacaagtatgtccgcaatctacaacacaggctctatgagtgtctctatagaaatagggatgttgatcatgaattcgtggatgagttttacgcttacctgcgtaaacatttctccatgatgattctttctgatgatgccgttgtgtgctataacagtaactatgcggctcaaggtttagtagctagcattaagaactttaaggcagttctttattatcaaaataatgtgttcatgtctgaggcaaaatgttggactgagactgaccttactaaaggacctcacgaattttgctcacagcatacaatgctagttaaacaaggagatgattacgtgtacctgccttacccagatccatcaagaatattaggcgcaggctgttttgtcgatgatattgtcaaaacagatggtacacttatgattgaaaggttcgtgtcactggctattgatgcttacccacttacaaaacatcctaatcaggagtatgctgatgtctttcacttgtatttacaatacattagaaagttacatgatgagcttactggccacatgttggacatgtattccgtaatgctaactaatgataacacctcacggtactgggaacctgagttttatgaggctatgtacacaccacatacagtcttgcaggctgtaggtgcttgtgtattgtgcaattcacagacttcacttcgttgcggtgcctgtattaggagaccattcctatgttgcaagtgctgctatgaccatgtcatttcaacatcacacaaattagtgttgtctgttaatccctatgtttgcaatgccccaggttgtgatgtcactgatgtgacacaactgtatctaggaggtatgagctattattgcaagtcacataagcctcccattagttttccattatgtgctaatggtcaggtttttggtttatacaaaaacacatgtgtaggcagtgacaatgtcactgacttcaatgcgatagcaacatgtgattggactaatgctggcgattacatacttgccaacacttgtactgagagactcaagcttttcgcagcagaaacgctcaaagccactgaggaaacatttaagctgtcatatggtattgccactgtacgcgaagtactctctgacagagaattgcatctttcatgggaggttggaaaacctagaccaccattgaacagaaactatgtctttactggttaccgtgtaactaaaaatagtaaagtacagattggagagtacacctttgaaaaaggtgactatggtgatgctgttgtgtacagaggtactacgacatacaagttgaatgttggtgattactttgtgttgacatctcacactgtaatgccacttagtgcacctactctagtgccacaagagcactatgtgagaattactggcttgtacccaacactcaacatctcagatgagttttctagcaatgttgcaaattatcaaaaggtcggcatgcaaaagtactctacactccaaggaccacctggtactggtaagagtcattttgccatcggacttgctctctattacccatctgctcgcatagtgtatacggcatgctctcatgcagctgttgatgccctatgtgaaaaggcattaaaatatttgcccatagataaatgtagtagaatcatacctgcgcgtgcgcgcgtagagtgttttgataaattcaaagtgaattcaacactagaacagtatgttttctgcactgtaaatgcattgccagaaacaactgctgacattgtagtctttgatgaaatctctatggctactaattatgacttgagtgttgtcaatgctagacttcgtgcaaaacactacgtctatattggcgatcctgctcaattaccagccccccgcacattgctgactaaaggcacactagaaccagaatattttaattcagtgtgcagacttatgaaaacaataggtccagacatgttccttggaacttgtcgccgttgtcctgctgaaattgttgacactgtgagtgctttagtttatgacaataagctaaaagcacacaaggataagtcagctcaatgcttcaaaatgttctacaaaggtgttattacacatgatgtttcatctgcaatcaacagacctcaaataggcgttgtaagagaatttcttacacgcaatcctgcttggagaaaagctgtttttatctcaccttataattcacagaacgctgtagcttcaaaaatcttaggattgcctacgcagactgttgattcatcacagggttctgaatatgactatgtcatattcacacaaactactgaaacagcacactcttgtaatgtcaaccgcttcaatgtggctatcacaagggcaaaaattggcattttgtgcataatgtctgatagagatctttatgacaaactgcaatttacaagtctagaaataccacgtcgcaatgtggctacattacaagcagaaaatgtaactggactttttaaggactgtagtaagatcattactggtcttcatcctacacaggcacctacacacctcagcgttgatataaagttcaagactgaaggattatgtgttgacataccaggcataccaaaggacatgacctaccgtagactcatctctatgatgggtttcaaaatgaattaccaagtcaatggttaccctaatatgtttatcacccgcgaagaagctattcgtcacgttcgtgcgtggattggctttgatgtagagggctgtcatgcaactagagatgctgtgggtactaacctacctctccagctaggattttctacaggtgttaacttagtagctgtaccgactggttatgttgacactgaaaataacacagaattcaccagagttaatgcaaaacctccaccaggtgaccagtttaaacatcttataccactcatgtataaaggcttgccctggaatgtagtgcgtattaagatagtacaaatgctcagtgatacactgaaaggattgtcagacagagtcgtgttcgtcctttgggcgcatggctttgagcttacatcaatgaagtactttgtcaagattggacctgaaagaacgtgttgtctgtgtgacaaacgtgcaacttgcttttctacttcatcagatacttatgcctgctggaatcattctgtgggttttgactatgtctataacccatttatgattgatgttcagcagtggggctttacgggtaaccttcagagtaaccatgaccaacattgccaggtacatggaaatgcacatgtggctagttgtgatgctatcatgactagatgtttagcagtccatgagtgctttgttaagcgcgttgattggtctgttgaataccctattataggagatgaactgagggttaattctgcttgcagaaaagtacaacacatggttgtgaagtctgcattgcttgctgataagtttccagttcttcatgacattggaaatccaaaggctatcaagtgtgtgcctcaggctgaagtagaatggaagttctacgatgctcagccatgtagtgacaaagcttacaaaatagaggaactcttctattcttatgctacacatcacgataaattcactgatggtgtttgtttgttttggaattgtaacgttgatcgttacccagccaatgcaattgtgtgtaggtttgacacaagagtcttgtcaaacttgaacttaccaggctgtgatggtggtagtttgtatgtgaataagcatgcattccacactccagctttcgataaaagtgcatttactaatttaaagcaattgcctttcttttactattctgatagtccttgtgagtctcatggcaaacaagtagtgtcggatattgattatgttccactcaaatctgctacgtgtattacacgatgcaatttaggtggtgctgtttgcagacaccatgcaaatgagtaccgacagtacttggatgcatataatatgatgatttctgctggatttagcctatggatttacaaacaatttgatacttataacctgtggaatacatttaccaggttacagagtttagaaaatgtggcttataatgttgttaataaaggacactttgatggacacgccggcgaagcacctgtttccatcattaataatgctgtttacacaaaggtagatggtattgatgtggagatctttgaaaataagacaacacttcctgttaatgttgcatttgagctttgggctaagcgtaacattaaaccagtgccagagattaagatactcaataatttgggtgttgatatcgctgctaatactgtaatctgggactacaaaagagaagccccagcacatgtatctacaataggtgtctgcacaatgactgacattgccaagaaacctactgagagtgcttgttcttcacttactgtcttgtttgatggtagagtggaaggacaggtagacctttttagaaacgcccgtaatggtgttttaataacagaaggttcagtcaaaggtctaacaccttcaaagggaccagcacaagctagcgtcaatggagtcacattaattggagaatcagtaaaaacacagtttaactactttaagaaagtagacggcattattcaacagttgcctgaaacctactttactcagagcagagacttagaggattttaagcccagatcacaaatggaaactgactttctcgagctcgctatggatgaattcatacagcgatataagctcgagggctatgccttcgaacacatcgtttatggagatttcagtcatggacaacttggcggtcttcatttaatgataggcttagccaagcgctcacaagattcaccacttaaattagaggattttatccctatggacagcacagtgaaaaattacttcataacagatgcgcaaacaggttcatcaaaatgtgtgtgttctgtgattgatcttttacttgatgactttgtcgagataataaagtcacaagatttgtcagtgatttcaaaagtggtcaaggttacaattgactatgctgaaatttcattcatgctttggtgtaaggatggacatgttgaaaccttctacccaaaactacaagcaagtcaagcgtggcaaccaggtgttgcgatgcctaacttgtacaagatgcaaagaatgcttcttgaaaagtgtgaccttcagaattatggtgaaaatgctgttataccaaaaggaataatgatgaatgtcgcaaagtatactcaactgtgtcaatacttaaatacacttactttagctgtaccctacaacatgagagttattcactttggtgctggctctgataaaggagttgcaccaggtacagctgtgctcagacaatggttgccaactggcacactacttgtcgattcagatcttaatgacttcgtctccgacgcagattctactttaattggagactgtgcaacagtacatacggctaataaatgggaccttattattagcgatatgtatgaccctaggaccaaacatgtgacaaaagagaatgactctaaagaagggtttttcacttatctgtgtggatttataaagcaaaaactagccctgggtggttctatagctgtaaagataacagagcattcttggaatgctgacctttacaagcttatgggccatttctcatggtggacagcttttgttacaaatgtaaatgcatcatcatcggaagcatttttaattggggctaactatcttggcaagccgaaggaacaaattgatggctataccatgcatgctaactacattttctggaggaacacaaatcctatccagttgtcttcctattcactctttgacatgagcaaatttcctcttaaattaagaggaactgctgtaatgtctcttaaggagaatcaaatcaatgatatgatttattctcttctggaaaaaggtaggcttatcattagagaaaacaacagagttgtggtttcaagtgatattcttgttaacaactaaacgaacatgtttattttcttattatttcttactctcactagtggtagtgaccttgaccggtgcaccacttttgatgatgttcaagctcctaattatactcaacatacttcatctatgaggggggtttactatcctgatgaaatttttagatcagacactctttatttaactcaggatttatttcttccattttattctaatgttacagggtttcatactattaatcatacgtttggcaaccctgtcataccttttaaggatggtatttattttgctgccacagagaaatcaaatgttgtccgtggttgggtttttggttctaccatgaacaacaagtcacagtcggtgattattattaacaattctactaatgttgttatacgagcatgtaactttgaattgtgtgacaaccctttctttgctgtttctaaacccatgggtacacagacacatactatgatattcgataatgcatttaattgcactttcgagtacatatctgatgccttttcgcttgatgtttcagaaaagtcaggtaattttaaacacttacgagagtttgtgtttaaaaataaagatgggtttctctatgtttataagggctatcaacctatagatgtagttcgtgatctaccttctggttttaacactttgaaacctatttttaagttgcctcttggtattaacattacaaattttagagccattcttacagccttttcacctgctcaagacatttggggcacgtcagctgcagcctattttgttggctatttaaagccaactacatttatgctcaagtatgatgaaaatggtacaatcacagatgctgttgattgttctcaaaatccacttgctgaactcaaatgctctgttaagagctttgagattgacaaaggaatttaccagacctctaatttcagggttgttccctcaggagatgttgtgagattccctaatattacaaacttgtgtccttttggagaggtttttaatgctactaaattcccttctgtctatgcatgggagagaaaaaaaatttctaattgtgttgctgattactctgtgctctacaactcaacatttttttcaacctttaagtgctatggcgtttctgccactaagttgaatgatctttgcttctccaatgtctatgcagattcttttgtagtcaagggagatgatgtaagacaaatagcgccaggacaaactggtgttattgctgattataattataaattgccagatgatttcatgggttgtgtccttgcttggaatactaggaacattgatgctacttcaactggtaattataattataaatataggtatcttagacatggcaagcttaggccctttgagagagacatatctaatgtgcctttctcccctgatggcaaaccttgcaccccacctgctcttaattgttattggccattaaatgattatggtttttacaccactactggcattggctaccaaccttacagagttgtagtactttcttttgaacttttaaatgcaccggccacggtttgtggaccaaaattatccactgaccttattaagaaccagtgtgtcaattttaattttaatggactcactggtactggtgtgttaactccttcttcaaagagatttcaaccatttcaacaatttggccgtgatgtttctgatttcactgattccgttcgagatcctaaaacatctgaaatattagacatttcaccttgctcttttgggggtgtaagtgtaattacacctggaacaaatgcttcatctgaagttgctgttctatatcaagatgttaactgcactgatgtttctacagcaattcatgcagatcaactcacaccagcttggcgcatatattctactggaaacaatgtattccagactcaagcaggctgtcttataggagctgagcatgtcgacacttcttatgagtgcgacattcctattggagctggcatttgtgctagttaccatacagtttctttattacgtagtactagccaaaaatctattgtggcttatactatgtctttaggtgctgatagttcaattgcttactctaataacaccattgctatacctactaacttttcaattagcattactacagaagtaatgcctgtttctatggctaaaacctccgtagattgtaatatgtacatctgcggagattctactgaatgtgctaatttgcttctccaatatggtagcttttgcacacaactaaatcgtgcactctcaggtattgctgctgaacaggatcgcaacacacgtgaagtgttcgctcaagtcaaacaaatgtacaaaaccccaactttgaaatattttggtggttttaatttttcacaaatattacctgaccctctaaagccaactaagaggtcttttattgaggacttgctctttaataaggtgacactcgctgatgctggcttcatgaagcaatatggcgaatgcctaggtgatattaatgctagagatctcatttgtgcgcagaagttcaatggacttacagtgttgccacctctgctcactgatgatatgattgctgcctacactgctgctctagttagtggtactgccactgctggatggacatttggtgctggcgctgctcttcaaataccttttgctatgcaaatggcatataggttcaatggcattggagttacccaaaatgttctctatgagaaccaaaaacaaatcgccaaccaatttaacaaggcgattagtcaaattcaagaatcacttacaacaacatcaactgcattgggcaagctgcaagacgttgttaaccagaatgctcaagcattaaacacacttgttaaacaacttagctctaattttggtgcaatttcaagtgtgctaaatgatatcctttcgcgacttgataaagtcgaggcggaggtacaaattgacaggttaattacaggcagacttcaaagccttcaaacctatgtaacacaacaactaatcagggctgctgaaatcagggcttctgctaatcttgctgctactaaaatgtctgagtgtgttcttggacaatcaaaaagagttgacttttgtggaaagggctaccaccttatgtccttcccacaagcagccccgcatggtgttgtcttcctacatgtcacgtatgtgccatcccaggagaggaacttcaccacagcgccagcaatttgtcatgaaggcaaagcatacttccctcgtgaaggtgtttttgtgtttaatggcacttcttggtttattacacagaggaacttcttttctccacaaataattactacagacaatacatttgtctcaggaaattgtgatgtcgttattggcatcattaacaacacagtttatgatcctctgcaacctgagcttgactcattcaaagaagagctggacaagtacttcaaaaatcatacatcaccagatgttgatcttggcgacatttcaggcattaacgcttctgtcgtcaacattcaaaaagaaattgaccgcctcaatgaggtcgctaaaaatttaaatgaatcactcattgaccttcaagaattgggaaaatatgagcaatatattaaatggccttggtatgtttggctcggcttcattgctggactaattgccatcgtcatggttacaatcttgctttgttgcatgactagttgttgcagttgcctcaagggtgcatgctcttgtggttcttgctgcaagtttgatgaggatgactctgagccagttctcaagggtgtcaaattacattacacataaacgaacttatggatttgtttatgagattttttactcttggatcaattactgcacagccagtaaaaattgacaatgcttctcctgcaagtactgttcatgctacagcaacgataccgctacaagcctcactccctttcggatggcttgttattggcgttgcatttcttgctgtttttcagagcgctaccaaaataattgcgctcaataaaagatggcagctagccctttataagggcttccagttcatttgcaatttactgctgctatttgttaccatctattcacatcttttgcttgtcgctgcaggtatggaggcgcaatttttgtacctctatgccttgatatattttctacaatgcatcaacgcatgtagaattattatgagatgttggctttgttggaagtgcaaatccaagaacccattactttatgatgccaactactttgtttgctggcacacacataactatgactactgtataccatataacagtgtcacagatacaattgtcgttactgaaggtgacggcatttcaacaccaaaactcaaagaagactaccaaattggtggttattctgaggataggcactcaggtgttaaagactatgtcgttgtacatggctatttcaccgaagtttactaccagcttgagtctacacaaattactacagacactggtattgaaaatgctacattcttcatctttaacaagcttgttaaagacccaccgaatgtgcaaatacacacaatcgacggctcttcaggagttgctaatccagcaatggatccaatttatgatgagccgacgacgactactagcgtgcctttgtaagcacaagaaagtgagtacgaacttatgtactcattcgtttcggaagaaacaggtacgttaatagttaatagcgtacttctttttcttgctttcgtggtattcttgctagttacactagccatccttactgcgcttcgattgtgtgcgtactgctgcaatattgttaacgtgagtttagtaaaaccaacggtttacgtctactcgcgtgttaaaaatctgaactcttctgaaggagttcctgatcttctggtctaaacgaactaactattattattattctgtttggaactttaacattgcttatcatggcagacaacggtactattaccgttgaggagcttaaacaactcctggaacaatggaacctagtaataggtttcctatgcctagcctggattatgttactacaatttgcctattctaatcggaacaggtttttgtacataataaagcttgttttcctctggctcttgtggccagtaacacttgcttgttttgtgcttgctgctgtctacagaattaattgggtgactggcgggattgcgattgcaatggcttgtattgtaggcttgatgtggcttagctacttcgttgcttccttcaggctgtttgctcgtacccgctcaatgtggtcattcaacccagaaacaaacattcttctcaatgtgcctctccgggggacaattgtgaccagaccgctcatggaaagtgaacttgtcattggtgctgtgatcattcgtggtcacttgcgaatggccggacactccctagggcgctgtgacattaaggacctgccaaaagagatcactgtggctacatcacgaacgctttcttattacaaattaggagcgtcgcagcgtgtaggcactgattcaggttttgctgcatacaaccgctaccgtattggaaactataaattaaatacagaccacgccggtagcaacgacaatattgctttgctagtacagtaagtgacaacagatgtttcatcttgttgacttccaggttacaatagcagagatattgattatcattatgaggactttcaggattgctatttggaatcttgacgttataataagttcaatagtgagacaattatttaagcctctaactaagaagaattattcggagttagatgatgaagaacctatggagttagattatccataaaacgaacatgaaaattattctcttcctgacattgattgtatttacatcttgcgagctatatcactatcaggagtgtgttagaggtacgactgtactactaaaagaaccttgcccatcaggaacatacgagggcaattcaccatttcaccctcttgctgacaataaatttgcactaacttgcactagcacacactttgcttttgcttgtgctgacggtactcgacatacctatcagctgcgtgcaagatcagtttcaccaaaacttttcatcagacaagaggaggttcaacaagagctctactcgccactttttctcattgttgctgctctagtatttttaatactttgcttcaccattaagagaaagacagaatgaatgagctcactttaattgacttctatttgtgctttttagcctttctgctattccttgttttaataatgcttattatattttggttttcactcgaaatccaggatctagaagaaccttgtaccaaagtctaaacgaacatgaaacttctcattgttttgacttgtatttctttatgcagttgcatatgcactgtagtacagcgctgtgcatctaataaacctcatgtgcttgaagatccttgtaaggtacaacactaggggtaatacttatagcactgcttggctttgtgctctaggaaaggttttaccttttcatagatggcacactatggttcaaacatgcacacctaatgttactatcaactgtcaagatccagctggtggtgcgcttatagctaggtgttggtaccttcatgaaggtcaccaaactgctgcatttagagacgtacttgttgttttaaataaacgaacaaattaaaatgtctgataatggaccccaatcaaaccaacgtagtgccccccgcattacatttggtggacccacagattcaactgacaataaccagaatggaggacgcaatggggcaaggccaaaacagcgccgaccccaaggtttacccaataatactgcgtcttggttcacagctctcactcagcatggcaaggaggaacttagattccctcgaggccagggcgttccaatcaacaccaatagtggtccagatgaccaaattggctactaccgaagagctacccgacgagttcgtggtggtgacggcaaaatgaaagagctcagccccagatggtacttctattacctaggaactggcccagaagcttcacttccctacggcgctaacaaagaaggcatcgtatgggttgcaactgagggagccttgaatacacccaaagaccacattggcacccgcaatcctaataacaatgctgccaccgtgctacaacttcctcaaggaacaacattgccaaaaggcttctacgcagagggaagcagaggcggcagtcaagcctcttctcgctcctcatcacgtagtcgcggtaattcaagaaattcaactcctggcagcagtaggggaaattctcctgctcgaatggctagcggaggtggtgaaactgccctcgcgctattgctgctagacagattgaaccagcttgagagcaaagtttctggtaaaggccaacaacaacaaggccaaactgtcactaagaaatctgctgctgaggcatctaaaaagcctcgccaaaaacgtactgccacaaaacagtacaacgtcactcaagcatttgggagacgtggtccagaacaaacccaaggaaatttcggggaccaagacctaatcagacaaggaactgattacaaacattggccgcaaattgcacaatttgctccaagtgcctctgcattctttggaatgtcacgcattggcatggaagtcacaccttcgggaacatggctgacttatcatggagccattaaattggatgacaaagatccacaattcaaagacaacgtcatactgctgaacaagcacattgacgcatacaaaacattcccaccaacagagcctaaaaaggacaaaaagaaaaagactgatgaagctcagcctttgccgcagagacaaaagaagcagcccactgtgactcttcttcctgcggctgacatggatgatttctccagacaacttcaaaattccatgagtggagcttctgctgattcaactcaggcataaacactcatgatgaccacacaaggcagatgggctatgtaaacgttttcgcaattccgtttacgatacatagtctactcttgtgcagaatgaattctcgtaactaaacagcacaagtaggtttagttaactttaatctcacatagcaatctttaatcaatgtgtaacattagggaggacttgaaagagccaccacattttcatcgaggccacgcggagtacgatcgagggtacagtgaataatgctagggagagctgcctatatggaagagccctaatgtgtaaaattaattttagtagtgctatccccatgtgattttaatagcttcttaggagaatgac

SEQ ID NO: 29784 - DNA, 29727 bp, SARS Coronavirus
atattaggtttttacctacccaggaaaagccaaccaacctcgatctcttgtagatctgttctctaaacgaactttaaaatctgtgtagctgtcgctcggctgcatgcctagtgcacctacgcagtataaacaataataaattttactgtcgttgacaagaaacgagtaactcgtccctcttctgcagactgcttacggtttcgtccgtgttgcagtcgatcatcagcatacctaggtttcgtccgggtgtgaccgaaaggtaagatggagagccttgttcttggtgtcaacgagaaaacacacgtccaactcagtttgcctgtccttcaggttagagacgtgctagtgcgtggcttcggggactctgtggaagaggccctatcggaggcacgtgaacacctcaaaaatggcacttgtggtctagtagagctggaaaaaggcgtactgccccagcttgaacagccctatgtgttcattaaacgttctgatgccttaagcaccaatcacggccacaaggtcgttgagctggttgcagaaatggacggcattcagtacggtcgtagcggtataacactgggagtactcgtgccacatgtgggcgaaaccccaattgcataccgcaatgttcttcttcgtaagaacggtaataagggagccggtggtcatagctatggcatcgatctaaagtcttatgacttaggtgacgagcttggcactgatcccattgaagattatgaacaaaactggaacactaagcatggcagtggtgcactccgtgaactcactcgtgagctcaatggaggtgcagtcactcgctatgtcgacaacaatttctgtggcccagatgggtaccctcttgattgcatcaaagattttctcgcacgcgcgggcaagtcaatgtgcactctttccgaacaacttgattacatcgagtcgaagagaggtgtctactgctgccgtgaccatgagcatgaaattgcctggttcactgagcgctctgataagagctacgagcaccagacacccttcgaaattaagagtgccaagaaatttgacactttcaaaggggaatgcccaaagtttgtgtttcctcttaactcaaaagtcaaagtcattcaaccacgtgttgaaaagaaaaagactgagggtttcatggggcgtatacgctctgtgtaccctgttgcatctccacaggagtgtaacaatatgcacttgtctaccttgatgaaatgtaatcattgcgatgaagtttcatggcagacgtgcgactttctgaaagccacttgtgaacattgtggcactgaaaatttagttattgaaggacctactacatgtgggtacctacctactaatgctgtagtgaaaatgccatgtcctgcctgtcaagacccagagattggacctgagcatagtgttgcagattatcacaaccactcaaacattgaaactcgactccgcaagggaggtaggactagatgttttggaggctgtgtgtttgcctatgttggctgctataataagcgtgcctactgggttcctcgtgctagtgctgatattggctcaggccatactggcattactggtgacaatgtggagaccttgaatgaggatctccttgagatactgagtcgtgaacgtgttaacattaacattgttggcgattttcatttgaatgaagaggttgccatcattttggcatctttctctgcttctacaagtgcctttattgacactataaagagtcttgattacaagtctttcaaaaccattgttgagtcctgcggtaactataaagttaccaagggaaagcccgtaaaaggtgcttggaacattggacaacagagatcagttttaacaccactgtgtggttttccctcacaggctgctggtgttatcagatcaatttttgcgcgcacacttgatgcagcaaaccactcaattcctgatttgcaaagagcagctgtcaccatacttgatggtatttctgaacagtcattacgtcttgtcgacgccatggtttatacttcagacctgctcaccaacagtgtcattattatggcatatgtaactggtggtcttgtacaacagacttctcagtggttgtctaatcttttgggcactactgttgaaaaactcaggcctatctttgaatggattgaggcgaaacttagtgcaggagttgaatttctcaaggatgcttgggagattctcaaatttctcattacaggtgtttttgacatcgtcaagggtcaaatacaggttgcttcagataacatcaaggattgtgtaaaatgcttcattgatgttgttaacaaggcactcgaaatgtgcattgatcaagtcactatcgctggcgcaaagttgcgatcactcaacttaggtgaagtcttcatcgctcaaagcaagggactttaccgtcagtgtatacgtggcaaggagcagctgcaactactcatgcctcttaaggcaccaaaagaagtaacctttcttgaaggtgattcacatgacacagtacttacctctgaggaggttgttctcaagaacggtgaactcgaagcactcgagacgcccgttgatagcttcacaaatggagctatcgttggcacaccagtctgtgtaaatggcctcatgctcttagagattaaggacaaagaacaatactgcgcattgtctcctggtttactggctacaaacaatgtctttcgcttaaaagggggtgcaccaattaaaggtgtaacctttggagaagatactgtttgggaagttcaaggttacaagaatgtgagaatcacatttgagcttgatgaacgtgttgacaaagtgcttaatgaaaagtgctctgtctacactgttgaatccggtaccgaagttactgagtttgcatgtgttgtagcagaggctgttgtgaagactttacaaccagtttctgatctccttaccaacatgggtattgatcttgatgagtggagtgtagctacattctacttatttgatgatgctggtgaagaaaacttttcatcacgtatgtattgttccttttaccctccagatgaggaagaagaggacgatgcagagtgtgaggaagaagaaattgatgaaacctgtgaacatgagtacggtacagaggatgattatcaaggtctccctctggaatttggtgcctcagctgaaacagttcgagttgaggaagaagaagaggaagactggctggatgatactactgagcaatcagagattgagccagaaccagaacctacacctgaagaaccagttaatcagtttactggttatttaaaacttactgacaatgttgccattaaatgtgttgacatcgttaaggaggcacaaagtgctaatcctatggtgattgtaaatgctgctaacatacacctgaaacatggtggtggtgtagcaggtgcactcaacaaggcaaccaatggtgccatgcaaaaggagagtgatgattacattaagctaaatggccctcttacagtaggagggtcttgtttgctttctggacataatcttgctaagaagtgtctgcatgttgttggacctaacctaaatgcaggtgaggacatccagcttcttaaggcagcatatgaaaatttcaattcacaggacatcttacttgcaccattgttgtcagcaggcatatttggtgctaaaccacttcagtctttacaagtgtgcgtgcagacggttcgtacacaggtttatattgcagtcaatgacaaagctctttatgagcaggttgtcatggattatcttgataacctgaagcctagagtggaagcacctaaacaagaggagccaccaaacacagaagattccaaaactgaggagaaatccgtcgtacagaagcctgtcgatgtgaagccaaaaattaaggcctgcattgatgaggttaccacaacactggaagaaactaagtttcttaccaataagttactcttgtttgctgatatcaatggtaagctttaccatgattctcagaacatgcttagaggtgaagatatgtctttccttgagaaggatgcaccttacatggtaggtgatgttatcactagtggtgatatcacttgtgttgtaataccctccaaaaaggctggtggcactactgagatgctctcaagagctttgaagaaagtgccagttgatgagtatataaccacgtaccctggacaaggatgtgctggttatacacttgaggaagctaagactgctcttaagaaatgcaaatctgcattttatgtactaccttcagaagcacctaatgctaaggaagagattctaggaactgtatcctggaatttgagagaaatgcttgctcatgctgaagagacaagaaaattaatgcctatatgcatggatgttagagccataatggcaaccatccaacgtaagtataaaggaattaaaattcaagagggcatcgttgactatggtgtccgattcttcttttatactagtaaagagcctgtagcttctattattacgaagctgaactctctaaatgagccgcttgtcacaatgccaattggttatgtgacacatggttttaatcttgaagaggctgcgcgctgtatgcgttctcttaaagctcctgccgtagtgtcagtatcatcaccagatgctgttactacatataatggatacctcacttcgtcatcaaagacatctgaggagcactttgtagaaacagtttctttggctggctcttacagagattggtcctattcaggacagcgtacagagttaggtgttgaatttcttaagcgtggtgacaaaattgtgtaccacactctggagagccccgtcgagtttcatcttgacggtgaggttctttcacttgacaaactaaagagtctcttatccctgcgggaggttaagactataaaagtgttcacaactgtggacaacactaatctccacacacagcttgtggatatgtctatgacatatggacagcagtttggtccaacatacttggatggtgctgatgttacaaaaattaaacctcatgtaaatcatgagggtaagactttctttgtactacctagtgatgacacactacgtagtgaagctttcgagtactaccatactcttgatgagagttttcttggtaggtacatgtctgctttaaaccacacaaagaaatggaaatttcctcaagttggtggtttaacttcaattaaatgggctgataacaattgttatttgtctagtgttttattagcacttcaacagcttgaagtcaaattcaatgcaccagcacttcaagaggcttattatagagcccgtgctggtgatgctgctaacttttgtgcactcatactcgcttacagtaataaaactgttggcgagcttggtgatgtcagagaaactatgacccatcttctacagcatgctaatttggaatctgcaaagcgagttcttaatgtggtgtgtaaacattgtggtcagaaaactactaccttaacgggtgtagaagctgtgatgtatatgggtactctatcttatgataatcttaagacaggtgtttccattccatgtgtgtgtggtcgtgatgctacacaatatctagtacaacaagagtcttcttttgttatgatgtctgcaccacctgctgagtataaattacagcaaggtacattcttatgtgcgaatgagtacactggtaactatcagtgtggtcattacactcatataactgctaaggagaccctctatcgtattgacggagctcaccttacaaagatgtcagagtacaaaggaccagtgactgatgttttctacaaggaaacatcttacactacaaccatcaagcctgtgtcgtataaactcgatggagttacttacacagagattgaaccaaaattggatgggtattataaaaaggataatgcttactatacagagcagcctatagaccttgtaccaactcaaccattaccaaatgcgagttttgataatttcaaactcacatgttctaacacaaaatttgctgatgatttaaatcaaatgacaggcttcacaaagccagcttcacgagagctatctgtcacattcttcccagacttgaatggcgatgtagtggctattgactatagacactattcagcgagtttcaagaaaggtgctaaattactgcataagccaattgtttggcacattaaccaggctacaaccaagacaacgttcaaaccaaacacttggtgtttacgttgtctttggagtacaaagccagtagatacttcaaattcatttgaagttctggcagtagaagacacacaaggaatggacaatcttgcttgtgaaagtcaacaacccacctctgaagaagtagtggaaaatcctaccatacagaaggaagtcatagagtgtgacgtgaaaactaccgaagttgtaggcaatgtcatacttaaaccatcagatgaaggtgttaaagtaacacaagagttaggtcatgaggatcttatggctgcttatgtggaaaacacaagcattaccattaagaaacctaatgagctttcactagccttaggtttaaaaacaattgccactcatggtattgctgcaattaatagtgttccttggagtaaaattttggcttatgtcaaaccattcttaggacaagcagcaattacaacatcaaattgcgctaagagattagcacaacgtgtgtttaacaattatatgccttatgtgtttacattattgttccaattgtgtacttttactaaaagtaccaattctagaattagagcttcactacctacaactattgctaaaaatagtgttaagagtgttgctaaattatgtttggatgccggcattaattatgtgaagtcacccaaattttctaaattgttcacaatcgctatgtggctattgttgttaagtatttgcttaggttctctaatctgtgtaactgctgcttttggtgtactcttatctaattttggtgctccttcttattgtaatggcgttagagaattgtatcttaattcgtctaacgttactactatggatttctgtgaaggttcttttccttgcagcatttgtttaagtggattagactcccttgattcttatccagctcttgaaaccattcaggtgacgatttcatcgtacaagctagacttgacaattttaggtctggccgctgagtgggttttggcatatatgttgttcacaaaattcttttatttattaggtctttcagctataatgcaggtgttctttggctattttgctagtcatttcatcagcaattcttggctcatgtggtttatcattagtattgtacaaatggcacccgtttctgcaatggttaggatgtacatcttctttgcttctttctactacatatggaagagctatgttcatatcatggatggttgcacctcttcgacttgcatgatgtgctataagcgcaatcgtgccacacgcgttgagtgtacaactattgttaatggcatgaagagatctttctatgtctatgcaaatggaggccgtggcttctgcaagactcacaattggaattgtctcaattgtgacacattttgcactggtagtacattcattagtgatgaagttgctcgtgatttgtcactccagtttaaaagaccaatcaaccctactgaccagtcatcgtatattgttgatagtgttgctgtgaaaaatggcgcgcttcacctctactttgacaaggctggtcaaaagacctatgagagacatccgctctcccattttgtcaatttagacaatttgagagctaacaacactaaaggttcactgcctattaatgtcatagtttttgatggcaagtccaaatgcgacgagtctgcttctaagtctgcttctgtgtactacagtcagctgatgtgccaacctattctgttgcttgaccaagctcttgtatcagacgttggagatagtactgaagtttccgttaagatgtttgatgcttatgtcgacaccttttcagcaacttttagtgttcctatggaaaaacttaaggcacttgttgctacagctcacagcgagttagcaaagggtgtagctttagatggtgtcctttctacattcgtgtcagctgcccgacaaggtgttgttgataccgatgttgacacaaaggatgttattgaatgtctcaaactttcacatcactctgacttagaagtgacaggtgacagttgtaacaatttcatgctcacctataataaggttgaaaacatgacgcccagagatcttggcgcatgtattgactgtaatgcaaggcatatcaatgcccaagtagcaaaaagtcacaatgtttcactcatctggaatgtaaaagactacatgtctttatctgaacagctgcgtaaacaaattcgtagtgctgccaagaagaacaacataccttttagactaacttgtgctacaactagacaggttgtcaatgtcataactactaaaatctcactcaagggtggtaagattgttagtacttgttttaaacttatgcttaaggccacattattgtgcgttcttgctgcattggtttgttatatcgttatgccagtacatacattgtcaatccatgatggttacacaaatgaaatcattggttacaaagccattcaggatggtgtcactcgtgacatcatttctactgatgattgttttgcaaataaacatgctggttttgacgcatggtttagccagcgtggtggttcatacaaaaatgacaaaagctgccctgtagtagctgctatcattacaagagagattggtttcatagtgcctggcttaccgggtactgtgctgagagcaatcaatggtgacttcttgcattttctacctcgtgtttttagtgctgttggcaacatttgctacacaccttccaaactcattgagtatagtgattttgctacctctgcttgcgttcttgctgctgagtgtacaatttttaaggatgctatgggcaaacctgtgccatattgttatgacactaatttgctagagggttctatttcttatagtgagcttcgtccagacactcgttatgtgcttatggatggttccatcatacagtttcctaacacttacctggagggttctgttagagtagtaacaacttttgatgctgagtactgtagacatggtacatgcgaaaggtcagaagtaggtatttgcctatctaccagtggtagatgggttcttaataatgagcattacagagctctatcaggagttttctgtggtgttgatgcgatgaatctcatagctaacatctttactcctcttgtgcaacctgtgggtgctttagatgtgtctgcttcagtagtggctggtggtattattgccatattggtgacttgtgctgcctactactttatgaaattcagacgtgtttttggtgagtacaaccatgttgttgctgctaatgcacttttgtttttgatgtctttcactatactctgtctggtaccagcttacagctttctgccgggagtctactcagtcttttacttgtacttgacattctatttcaccaatgatgtttcattcttggctcaccttcaatggtttgccatgttttctcctattgtgcctttttggataacagcaatctatgtattctgtatttctctgaagcactgccattggttctttaacaactatcttaggaaaagagtcatgtttaatggagttacatttagtaccttcgaggaggctgctttgtgtacctttttgctcaacaaggaaatgtacctaaaattgcgtagcgagacactgttgccacttacacagtataacaggtatcttgctctatataacaagtacaagtatttcagtggagccttagatactaccagctatcgtgaagcagcttgctgccacttagcaaaggctctaaatgactttagcaactcaggtgctgatgttctctaccaaccaccacagacatcaatcacttctgctgttctgcagagtggttttaggaaaatggcattcccgtcaggcaaagttgaagggtgcatggtacaagtaacctgtggaactacaactcttaatggattgtggttggatgacacagtatactgtccaagacatgtcatttgcacagcagaagacatgcttaatcctaactatgaagatctgctcattcgcaaatccaaccatagctttcttgttcaggctggcaatgttcaacttcgtgttattggccattctatgcaaaattgtctgcttaggcttaaagttgatacttctaaccctaagacacccaagtataaatttgtccgtatccaacctggtcaaacattttcagttctagcatgctacaatggttcaccatctggtgtttatcagtgtgccatgagacctaatcataccattaaaggttctttccttaatggatcatgtggtagtgttggttttaacattgattatgattgcgtgtctttctgctatatgcatcatatggagcttccaacaggagtacacgctggtactgacttagaaggtaaattctatggtccatttgttgacagacaaactgcacaggctgcaggtacagacacaaccataacattaaatgttttggcatggctgtatgctgctgttatcaatggtgataggtggtttcttaatagattcaccactactttgaatgactttaaccttgtggcaatgaagtacaactatgaacctttgacacaagatcatgttgacatattgggacctctttctgctcaaacaggaattgccgtcttagatatgtgtgctgctttgaaagagctgctgcagaatggtatgaatggtcgtactatccttggtagcactattttagaagatgagtttacaccatttgatgttgttagacaatgctctggtgttaccttccaaggtaagttcaagaaaattgttaagggcactcatcattggatgcttttaactttcttgacatcactattgattcttgttcaaagtacacagtggtcactgtttttctttgtttacgagaatgctttcttgccatttactcttggtattatggcaattgctgcatgtgctatgctgcttgttaagcataagcacgcattcttgtgcttgtttctgttaccttctcttgcaacagttgcttactttaatatggtctacatgcctgctagctgggtgatgcgtatcatgacatggcttgaattggctgacactagcttgtctggttataggcttaaggattgtgttatgtatgcttcagctttagttttgcttattctcatgacagctcgcactgtttatgatgatgctgctagacgtgtttggacactgatgaatgtcattacacttgtttacaaagtctactatggtaatgctttagatcaagctatttccatgtgggccttagttatttctgtaacctctaactattctggtgtcgttacgactatcatgtttttagctagagctatagtgtttgtgtgtgttgagtattatccattgttatttattactggcaacaccttacagtgtatcatgcttgtttattgtttcttaggctattgttgctgctgctactttggccttttctgtttactcaaccgttacttcaggcttactcttggtgtttatgactacttggtctctacacaagaatttaggtatatgaactcccaggggcttttgcctcctaagagtagtattgatgctttcaagcttaacattaagttgttgggtattggaggtaaaccatgtatcaaggttgctactgtacagtctaaaatgtctgacgtaaagtgcacatctgtggtactgctctcggttcttcaacaacttagagtagagtcatcttctaaattgtgggcacaatgtgtacaactccacaatgatattcttcttgcaaaagacacaactgaagctttcgagaagatggtttctcttttgtctgttttgctatccatgcagggtgctgtagacattaataggttgtgcgaggaaatgctcgataaccgtgctactcttcaggctattgcttcagaatttagttctttaccatcatatgccgcttatgccactgcccaggaggcctatgagcaggctgtagctaatggtgattctgaagtcgttctcaaaaagttaaagaaatctttgaatgtggctaaatctgagtttgaccgtgatgctgccatgcaacgcaagttggaaaagatggcagatcaggctatgacccaaatgtacaaacaggcaagatctgaggacaagagggcaaaagtaactagtgctatgcaaacaatgctcttcactatgcttaggaagcttgataatgatgcacttaacaacattatcaacaatgcgcgtgatggttgtgttccactcaacatcataccattgactacagcagccaaactcatggttgttgtccctgattatggtacctacaagaacacttgtgatggtaacacctttacatatgcatctgcactctgggaaatccagcaagttgttgatgcggatagcaagattgttcaacttagtgaaattaacatggacaattcaccaaatttggcttggcctcttattgttacagctctaagagccaactcagctgttaaactacagaataatgaactgagtccagtagcactacgacagatgtcctgtgcggctggtaccacacaaacagcttgtactgatgacaatgcacttgcctactataacaattcgaagggaggtaggtttgtgctggcattactatcagaccaccaagatctcaaatgggctagattccctaagagtgatggtacaggtacaatttacacagaactggaaccaccttgtaggtttgttacagacacaccaaaagggcctaaagtgaaatacttgtacttcatcaaaggcttaaacaacctaaatagaggtatggtgctgggcagtttagctgctacagtacgtcttcaggctggaaatgctacagaagtacctgccaattcaactgtgctttccttctgtgcttttgcagtagaccctgctaaagcatataaggattacctagcaagtggaggacaaccaatcaccaactgtgtgaagatgttgtgtacacacactggtacaggacaggcaattactgtaacaccagaagctaacatggaccaagagtcctttggtggtgcttcatgttgtctgtattgtagatgccacattgaccatccaaatcctaaaggattctgtgacttgaaaggtaagtacgtccaaatacctaccacttgtgctaatgacccagtgggttttacacttagaaacacagtctgtaccgtctgcggaatgtggaaaggttatggctgtagttgtgatcaactccgcgaacccttgatgcagtctgcggatgcatcaacgtttttaaacgggtttgcggtgtaagtgcagcccgtcttacaccgtgcggcacaggcactagtactgatgtcgtctacagggcttttgatatttacaacgaaaaagttgctggttttgcaaagttcctaaaaactaattgctgtcgcttccaggagaaggatgaggaaggcaatttattagactcttactttgtagttaagaggcatactatgtctaactaccaacatgaagagactatttataacttggttaaagattgtccagcggttgctgtccatgactttttcaagtttagagtagatggtgacatggtaccacatatatcacgtcagcgtctaactaaatacacaatggctgatttagtctatgctctacgtcattttgatgagggtaattgtgatacattaaaagaaatactcgtcacatacaattgctgtgatgatgattatttcaataagaaggattggtatgacttcgtagagaatcctgacatcttacgcgtatatgctaacttaggtgagcgtgtacgccaatcattattaaagactgtacaattctgcgatgctatgcgtgatgcaggcattgtaggcgtactgacattagataatcaggatcttaatgggaactggtacgatttcggtgatttcgtacaagtagcaccaggctgcggagttcctattgtggattcatattactcattgctgatgcccatcctcactttgactagggcattggctgctgagtcccatatggatgctgatctcgcaaaaccacttattaagtgggatttgctgaaatatgattttacggaagagagactttgtctcttcgaccgttattttaaatattgggaccagacataccatcccaattgtattaactgtttggatgataggtgtatccttcattgtgcaaactttaatgtgttattttctactgtgtttccacctacaagttttggaccactagtaagaaaaatatttgtagatggtgttccttttgttgtttcaactggataccattttcgtgagttaggagtcgtacataatcaggatgtaaacttacatagctcgcgtctcagtttcaaggaacttttagtgtatgctgctgatccagctatgcatgcagcttctggcaatttattgctagataaacgcactacatgcttttcagtagctgcactaacaaacaatgttgcttttcaaactgtcaaacccggtaattttaataaagacttttatgactttgctgtgtctaaaggtttctttaaggaaggaagttctgttgaactaaaacacttcttctttgctcaggatggcaacgctgctatcagtgattatgactattatcgttataatctgccaacaatgtgtgatatcagacaactcctattcgtagttgaagttgttgataaatactttgattgttacgatggtggctgtattaatgccaaccaagtaatcgttaacaatctggataaatcagctggtttcccatttaataaatggggtaaggctagactttattatgactcaatgagttatgaggatcaagatgcacttttcgcgtatactaagcgtaatgtcatccctactataactcaaatgaatcttaagtatgccattagtgcaaagaatagagctcgcaccgtagctggtgtctctatctgtagtactatgacaaatagacagtttcatcagaaattattgaagtcaatagccgccactagaggagctactgtggtaattggaacaagcaagttttacggtggctggcataatatgttaaaaactgtttacagtgatgtagaaactccacaccttatgggttgggattatccaaaatgtgacagagccatgcctaacatgcttaggataatggcctctcttgttcttgctcgcaaacataacacttgctgtaacttatcacaccgtttctacaggttagctaacgagtgtgcgcaagtattaagtgagatggtcatgtgtggcggctcactatatgttaaaccaggtggaacatcatccggtgatgctacaactgcttatgctaatagtgtctttaacatttgtcaagctgttacagccaatgtaaatgcacttctttcaactgatggtaataagatagctgacaagtatgtccgcaatctacaacacaggctctatgagtgtctctatagaaatagggatgttgatcatgaattcgtggatgagttttacgcttacctgcgtaaacatttctccatgatgattctttctgatgatgccgttgtgtgctataacagtaactatgcggctcaaggtttagtagctagcattaagaactttaaggcagttctttattatcaaaataatgtgttcatgtctgaggcaaaatgttggactgagactgaccttactaaaggacctcacgaattttgctcacagcatacaatgctagttaaacaaggagatgattacgtgtacctgccttacccagatccatcaagaatattaggcgcaggctgttttgtcgatgatattgtcaaaacagatggtacacttatgattgaaaggttcgtgtcactggctattgatgcttacccacttacaaaacatcctaatcaggagtatgctgatgtctttcacttgtatttacaatacattagaaagttacatgatgagcttactggccacatgttggacatgtattccgtaatgctaactaatgataacacctcacggtactgggaacctgagttttatgaggctatgtacacaccacatacagtcttgcaggctgtaggtgcttgtgtattgtgcaattcacagacttcacttcgttgcggtgcctgtattaggagaccattcctatgttgcaagtgctgctatgaccatgtcatttcaacatcacacaaattagtgttgtctgttaatccctatgtttgcaatgccccaggttgtgatgtcactgatgtgacacaactgtatctaggaggtatgagctattattgcaagtcacataagcctcccattagttttccattatgtgctaatggtcaggtttttggtttatacaaaaacacatgtgtaggcagtgacaatgtcactgacttcaatgcgatagcaacatgtgattggactaatgctggcgattacatacttgccaacacttgtactgagagactcaagcttttcgcagcagaaacgctcaaagccactgaggaaacatttaagctgtcatatggtattgccactgtacgcgaagtactctctgacagagaattgcatctttcatgggaggttggaaaacctagaccaccattgaacagaaactatgtctttactggttaccgtgtaactaaaaatagtaaagtacagattggagagtacacctttgaaaaaggtgactatggtgatgctgttgtgtacagaggtactacgacatacaagttgaatgttggtgattactttgtgttgacatctcacactgtaatgccacttagtgcacctactctagtgccacaagagcactatgtgagaattactggcttgtacccaacactcaacatctcagatgagttttctagcaatgttgcaaattatcaaaaggtcggcatgcaaaagtactctacactccaaggaccacctggtactggtaagagtcattttgccatcggacttgctctctattacccatctgctcgcatagtgtatacggcatgctctcatgcagctgttgatgccctatgtgaaaaggcattaaaatatttgcccatagataaatgtagtagaatcatacctgcgcgtgcgcgcgtagagtgttttgataaattcaaagtgaattcaacactagaacagtatgttttctgcactgtaaatgcattgccagaaacaactgctgacattgtagtctttgatgaaatctctatggctactaattatgacttgagtgttgtcaatgctagacttcgtgcaaaacactacgtctatattggcgatcctgctcaattaccagccccccgcacattgctgactaaaggcacactagaaccagaatattttaattcagtgtgcagacttatgaaaacaataggtccagacatgttccttggaacttgtcgccgttgtcctgctgaaattgttgacactgtgagtgctttagtttatgacaataagctaaaagcacacaaggataagtcagctcaatgcttcaaaatgttctacaaaggtgttattacacatgatgtttcatctgcaatcaacagacctcaaataggcgttgtaagagaatttcttacacgcaatcctgcttggagaaaagctgtttttatctcaccttataattcacagaacgctgtagcttcaaaaatcttaggattgcctacgcagactgttgattcatcacagggttctgaatatgactatgtcatattcacacaaactactgaaacagcacactcttgtaatgtcaaccgcttcaatgtggctatcacaagggcaaaaattggcattttgtgcataatgtctgatagagatctttatgacaaactgcaatttacaagtctagaaataccacgtcgcaatgtggctacattacaagcagaaaatgtaactggactttttaaggactgtagtaagatcattactggtcttcatcctacacaggcacctacacacctcagcgttgatataaagttcaagactgaaggattatgtgttgacataccaggcataccaaaggacatgacctaccgtagactcatctctatgatgggtttcaaaatgaattaccaagtcaatggttaccctaatatgtttatcacccgcgaagaagctattcgtcacgttcgtgcgtggattggctttgatgtagagggctgtcatgcaactagagatgctgtgggtactaacctacctctccagctaggattttctacaggtgttaacttagtagctgtaccgactggttatgttgacactgaaaataacacagaattcaccagagttaatgcaaaacctccaccaggtgaccagtttaaacatcttataccactcatgtataaaggcttgccctggaatgtagtgcgtattaagatagtacaaatgctcagtgatacactgaaaggattgtcagacagagtcgtgttcgtcctttgggcgcatggctttgagcttacatcaatgaagtactttgtcaagattggacctgaaagaacgtgttgtctgtgtgacaaacgtgcaacttgcttttctacttcatcagatacttatgcctgctggaatcattctgtgggttttgactatgtctataacccatttatgattgatgttcagcagtggggctttacgggtaaccttcagagtaaccatgaccaacattgccaggtacatggaaatgcacatgtggctagttgtgatgctatcatgactagatgtttagcagtccatgagtgctttgttaagcgcgttgattggtctgttgaataccctattataggagatgaactgagggttaattctgcttgcagaaaagtacaacacatggttgtgaagtctgcattgcttgctgataagtttccagttcttcatgacattggaaatccaaaggctatcaagtgtgtgcctcaggctgaagtagaatggaagttctacgatgctcagccatgtagtgacaaagcttacaaaatagaggaactcttctattcttatgctacacatcacgataaattcactgatggtgtttgtttgttttggaattgtaacgttgatcgttacccagccaatgcaattgtgtgtaggtttgacacaagagtcttgtcaaacttgaacttaccaggctgtgatggtggtagtttgtatgtgaataagcatgcattccacactccagctttcgataaaagtgcatttactaatttaaagcaattgcctttcttttactattctgatagtccttgtgagtctcatggcaaacaagtagtgtcggatattgattatgttccactcaaatctgctacgtgtattacacgatgcaatttaggtggtgctgtttgcagacaccatgcaaatgagtaccgacagtacttggatgcatataatatgatgatttctgctggatttagcctatggatttacaaacaatttgatacttataacctgtggaatacatttaccaggttacagagtttagaaaatgtggcttataatgttgttaataaaggacactttgatggacacgccggcgaagcacctgtttccatcattaataatgctgtttacacaaaggtagatggtattgatgtggagatctttgaaaataagacaacacttcctgttaatgttgcatttgagctttgggctaagcgtaacattaaaccagtgccagagattaagatactcaataatttgggtgttgatatcgctgctaatactgtaatctgggactacaaaagagaagccccagcacatgtatctacaataggtgtctgcacaatgactgacattgccaagaaacctactgagagtgcttgttcttcacttactgtcttgtttgatggtagagtggaaggacaggtagacctttttagaaacgcccgtaatggtgttttaataacagaaggttcagtcaaaggtctaacaccttcaaagggaccagcacaagctagcgtcaatggagtcacattaattggagaatcagtaaaaacacagtttaactactttaagaaagtagacggcattattcaacagttgcctgaaacctactttactcagagcagagacttagaggattttaagcccagatcacaaatggaaactgactttctcgagctcgctatggatgaattcatacagcgatataagctcgagggctatgccttcgaacacatcgtttatggagatttcagtcatggacaacttggcggtcttcatttaatgataggcttagccaagcgctcacaagattcaccacttaaattagaggattttatccctatggacagcacagtgaaaaattacttcataacagatgcgcaaacaggttcatcaaaatgtgtgtgttctgtgattgatcttttacttgatgactttgtcgagataataaagtcacaagatttgtcagtgatttcaaaagtggtcaaggttacaattgactatgctgaaatttcattcatgctttggtgtaaggatggacatgttgaaaccttctacccaaaactacaagcaagtcaagcgtggcaaccaggtgttgcgatgcctaacttgtacaagatgcaaagaatgcttcttgaaaagtgtgaccttcagaattatggtgaaaatgctgttataccaaaaggaataatgatgaatgtcgcaaagtatactcaactgtgtcaatacttaaatacacttactttagctgtaccctacaacatgagagttattcactttggtgctggctctgataaaggagttgcaccaggtacagctgtgctcagacaatggttgccaactggcacactacttgtcgattcagatcttaatgacttcgtctccgacgcagattctactttaattggagactgtgcaacagtacatacggctaataaatgggaccttattattagcgatatgtatgaccctaggaccaaacatgtgacaaaagagaatgactctaaagaagggtttttcacttatctgtgtggatttataaagcaaaaactagccctgggtggttctatagctgtaaagataacagagcattcttggaatgctgacctttacaagcttatgggccatttctcatggtggacagcttttgttacaaatgtaaatgcatcatcatcggaagcatttttaattggggctaactatcttggcaagccgaaggaacaaattgatggctataccatgcatgctaactacattttctggaggaacacaaatcctatccagttgtcttcctattcactctttgacatgagcaaatttcctcttaaattaagaggaactgctgtaatgtctcttaaggagaatcaaatcaatgatatgatttattctcttctggaaaaaggtaggcttatcattagagaaaacaacagagttgtggtttcaagtgatattcttgttaacaactaaacgaacatgtttattttcttattatttcttactctcactagtggtagtgaccttgaccggtgcaccacttttgatgatgttcaagctcctaattacactcaacatacttcatctatgaggggggtttactatcctgatgaaatttttagatcagacactctttatttaactcaggatttatttcttccattttattctaatgttacagggtttcatactattaatcatacgtttggcaaccctgtcataccttttaaggatggtatttattttgctgccacagagaaatcaaatgttgtccgtggttgggtttttggttctaccatgaacaacaagtcacagtcggtgattattattaacaattctactaatgttgttatacgagcatgtaactttgaattgtgtgacaaccctttctttgctgtttctaaacccatgggtacacagacacatactatgatattcgataatgcatttaattgcactttcgagtacatatctgatgccttttcgcttgatgtttcagaaaagtcaggtaattttaaacacttacgagagtttgtgtttaaaaataaagatgggtttctctatgtttataagggctatcaacctatagatgtagttcgtgatctaccttctggttttaacactttgaaacctatttttaagttgcctcttggtattaacattacaaattttagagccattcttacagccttttcacctgctcaagacatttggggcacgtcagctgcagcctattttgttggctatttaaagccaactacatttatgctcaagtatgatgaaaatggtacaatcacagatgctgttgattgttctcaaaatccacttgctgaactcaaatgctctgttaagagctttgagattgacaaaggaatttaccagacctctaatttcagggttgttccctcaggagatgttgtgagattccctaatattacaaacttgtgtccttttggagaggtttttaatgctactaaattcccttctgtctatgcatgggagagaaaaaaaatttctaattgtgttgctgattactctgtgctctacaactcaacatttttttcaacctttaagtgctatggcgtttctgccactaagttgaatgatctttgcttctccaatgtctatgcagattcttttgtagtcaagggagatgatgtaagacaaatagcgccaggacaaactggtgttattgctgattataattataaattgccagatgatttcatgggttgtgtccttgcttggaatactaggaacattgatgctacttcaactggtaattataattataaatataggtatcttagacatggcaagcttaggccctttgagagagacatatctaatgtgcctttctcccctgatggcaaaccttgcaccccacctgctcttaattgttattggccattaaatgattatggtttttacaccactactggcattggctaccaaccttacagagttgtagtactttcttttgaacttttaaatgcaccggccacggtttgtggaccaaaattatccactgaccttattaagaaccagtgtgtcaattttaattttaatggactcactggtactggtgtgttaactccttcttcaaagagatttcaaccatttcaacaatttggccgtgatgtttctgatttcactgattccgttcgagatcctaaaacatctgaaatattagacatttcaccttgctcttttgggggtgtaagtgtaattacacctggaacaaatgcttcatctgaagttgctgttctatatcaagatgttaactgcactgatgtttctacagcaattcatgcagatcaactcacaccagcttggcgcatatattctactggaaacaatgtattccagactcaagcaggctgtcttataggagctgagcatgtcgacacttcttatgagtgcgacattcctattggagctggcatttgtgctagttaccatacagtttctttattacgtagtactagccaaaaatctattgtggcttatactatgtctttaggtgctgatagttcaattgcttactctaataacaccattgctatacctactaacttttcaattagcattactacagaagtaatgcctgtttctatggctaaaacctccgtagattgtaatatgtacatctgcggagattctactgaatgtgctaatttgcttctccaatatggtagcttttgcacacaactaaatcgtgcactctcaggtattgctgctgaacaggatcgcaacacacgtgaagtgttcgctcaagtcaaacaaatgtacaaaaccccaactttgaaatattttggtggttttaatttttcacaaatattacctgaccctctaaagccaactaagaggtcttttattgaggacttgctctttaataaggtgacactcgctgatgctggcttcatgaagcaatatggcgaatgcctaggtgatattaatgctagagatctcatttgtgcgcagaagttcaatggacttacagtgttgccacctctgctcactgatgatatgattgctgcctacactgctgctctagttagtggtactgccactgctggatggacatttggtgctggcgctgctcttcaaataccttttgctatgcaaatggcatataggttcaatggcattggagttacccaaaatgttctctatgagaaccaaaaacaaatcgccaaccaatttaacaaggcgattagtcaaattcaagaatcacttacaacaacatcaactgcattgggcaagctgcaagacgttgttaaccagaatgctcaagcattaaacacacttgttaaacaacttagctctaattttggtgcaatttcaagtgtgctaaatgatatcctttcgcgacttgataaagtcgaggcggaggtacaaattgacaggttaattacaggcagacttcaaagccttcaaacctatgtaacacaacaactaatcagggctgctgaaatcagggcttctgctaatcttgctgctactaaaatgtctgagtgtgttcttggacaatcaaaaagagttgacttttgtggaaagggctaccaccttatgtccttcccacaagcagccccgcatggtgttgtcttcctacatgtcacgtatgtgccatcccaggagaggaacttcaccacagcgccagcaatttgtcatgaaggcaaagcatacttccctcgtgaaggtgtttttgtgtttaatggcacttcttggtttattacacagaggaacttcttttctccacaaataattactacagacaatacatttgtctcaggaaattgtgatgtcgttattggcatcattaacaacacagtttatgatcctctgcaacctgagcttgactcattcaaagaagagctggacaagtacttcaaaaatcatacatcaccagatgttgatcttggcgacatttcaggcattaacgcttctgtcgtcaacattcaaaaagaaattgaccgcctcaatgaggtcgctaaaaatttaaatgaatcactcattgaccttcaagaattgggaaaatatgagcaatatattaaatggccttggtatgtttggctcggcttcattgctggactaattgccatcgtcatggttacaatcttgctttgttgcatgactagttgttgcagttgcctcaagggtgcatgctcttgtggttcttgctgcaagtttgatgaggatgactctgagccagttctcaagggtgtcaaattacattacacataaacgaacttatggatttgtttatgagattttttactcttggatcaattactgcacagccagtaaaaattgacaatgcttctcctgcaagtactgttcatgctacagcaacgataccgctacaagcctcactccctttcggatggcttgttattggcgttgcatttcttgctgtttttcagagcgctaccaaaataattgcgctcaataaaagatggcagctagccctttataagggcttccagttcatttgcaatttactgctgctatttgttaccatctattcacatcttttgcttgtcgctgcaggtatggaggcgcaatttttgtacctctatgccttgatatattttctacaatgcatcaacgcatgtagaattattatgagatgttggctttgttggaagtgcaaatccaagaacccattactttatgatgccaactactttgtttgctggcacacacataactatgactactgtataccatataacagtgtcacagatacaattgtcgttactgaaggtgacggcatttcaacaccaaaactcaaagaagactaccaaattggtggttattctgaggataggcactcaggtgttaaagactatgtcgttgtacatggctatttcaccgaagtttactaccagcttgagtctacacaaattactacagacactggtattgaaaatgctacattcttcatctttaacaagcttgttaaagacccaccgaatgtgcaaatacacacaatcgacggctcttcaggagttgctaatccagcaatggatccaatttatgatgagccgacgacgactactagcgtgcctttgtaagcacaagaaagtgagtacgaacttatgtactcattcgtttcggaagaaacaggtacgttaatagttaatagcgtacttctttttcttgctttcgtggtattcttgctagttacactagccatccttactgcgcttcgattgtgtgcgtactgctgcaatattgttaacgtgagtttagtaaaaccaacggtttacgtctactcgcgtgttaaaaatctgaactcttctgaaggagttcctgatcttctggtctaaacgaactaactattattattattctgtttggaactttaacattgcttatcatggcagacaacggtactattaccgttgaggagcttaaacaactcctggaacaatggaacctagtaataggtttcctatgcctagcctggattatgttactacaatttgcctattctaatcggaacaggtttttgtacataataaagcttgttttcctctggctcttgtggccagtaacacttgcttgttttgtgcttgctgctgtctacagaattaattgggtgactggcgggattgcgattgcaatggcttgtattgtaggcttgatgtggcttagctacttcgttgcttccttcaggctgtttgctcgtacccgctcaatgtggtcattcaacccagaaacaaacattcttctcaatgtgcctctccgggggacaattgtgaccagaccgctcatggaaagtgaacttgtcattggtgctgtgatcattcgtggtcacttgcgaatggccggacactccctagggcgctgtgacattaaggacctgccaaaagagatcactgtggctacatcacgaacgctttcttattacaaattaggagcgtcgcagcgtgtaggcactgattcaggttttgctgcatacaaccgctaccgtattggaaactataaattaaatacagaccacgccggtagcaacgacaatattgctttgctagtacagtaagtgacaacagatgtttcatcttgttgacttccaggttacaatagcagagatattgattatcattatgaggactttcaggattgctatttggaatcttgacgttataataagttcaatagtgagacaattatttaagcctctaactaagaagaattattcggagttagatgatgaagaacctatggagttagattatccataaaacgaacatgaaaattattctcttcctgacattgattgtatttacatcttgcgagctatatcactatcaggagtgtgttagaggtacgactgtactactaaaagaaccttgcccatcaggaacatacgagggcaattcaccatttcaccctcttgctgacaataaatttgcactaacttgcactagcacacactttgcttttgcttgtgctgacggtactcgacatacctatcagctgcgtgcaagatcagtttcaccaaaacttttcatcagacaagaggaggttcaacaagagctctactcgccactttttctcattgttgctgctctagtatttttaatactttgcttcaccattaagagaaagacagaatgaatgagctcactttaattgacttctatttgtgctttttagcctttctgctattccttgttttaataatgcttattatattttggttttcactcgaaatccaggatctagaagaaccttgtaccaaagtctaaacgaacatgaaacttctcattgttttgacttgtatttctttatgcagttgcatatgcactgtagtacagcgctgtgcatctaataaacctcatgtgcttgaagatccttgtaaggtacaacactaggggtaatacttatagcactgcttggctttgtgctctaggaaaggttttaccttttcatagatggcacactatggttcaaacatgcacacctaatgttactatcaactgtcaagatccagctggtggtgcgcttatagctaggtgttggtaccttcatgaaggtcaccaaactgctgcatttagagacgtacttgttgttttaaataaacgaacaaattaaaatgtctgataatggaccccaatcaaaccaacgtagtgccccccgcattacatttggtggacccacagattcaactgacaataaccagaatggaggacgcaatggggcaaggccaaaacagcgccgaccccaaggtttacccaataatactgcgtcttggttcacagctctcactcagcatggcaaggaggaacttagattccctcgaggccagggcgttccaatcaacaccaatagtggtccagatgaccaaattggctactaccgaagagctacccgacgagttcgtggtggtgacggcaaaatgaaagagctcagccccagatggtacttctattacctaggaactggcccagaagcttcacttccctacggcgctaacaaagaaggcatcgtatgggttgcaactgagggagccttgaatacacccaaagaccacattggcacccgcaatcctaataacaatgctgccaccgtgctacaacttcctcaaggaacaacattgccaaaaggcttctacgcagagggaagcagaggcggcagtcaagcctcttctcgctcctcatcacgtagtcgcggtaattcaagaaattcaactcctggcagcagtaggggaaattctcctgctcgaatggctagcggaggtggtgaaactgccctcgcgctattgctgctagacagattgaaccagcttgagagcaaagtttctggtaaaggccaacaacaacaaggccaaactgtcactaagaaatctgctgctgaggcatctaaaaagcctcgccaaaaacgtactgccacaaaacagtacaacgtcactcaagcatttgggagacgtggtccagaacaaacccaaggaaatttcggggaccaagacctaatcagacaaggaactgattacaaacattggccgcaaattgcacaatttgctccaagtgcctctgcattctttggaatgtcacgcattggcatggaagtcacaccttcgggaacatggctgacttatcatggagccattaaattggatgacaaagatccacaattcaaagacaacgtcatactgctgaacaagcacattgacgcatacaaaacattcccaccaacagagcctaaaaaggacaaaaagaaaaagactgatgaagctcagcctttgccgcagagacaaaagaagcagcccactgtgactcttcttcctgcggctgacatggatgatttctccagacaacttcaaaattccatgagtggagcttctgctgattcaactcaggcataaacactcatgatgaccacacaaggcagatgggctatgtaaacgttttcgcaattccgtttacgatacatagtctactcttgtgcagaatgaattctcgtaactaaacagcacaagtaggtttagttaactttaatctcacatagcaatctttaatcaatgtgtaacattagggaggacttgaaagagccaccacattttcatcgaggccacgcggagtacgatcgagggtacagtgaataatgctagggagagctgcctatatggaagagccctaatgtgtaaaattaattttagtagtgctatccccatgtgattttaatagcttcttaggagaatgac

SEQ ID NO: 29785 - DNA, 29725 bp, SARS Coronavirus; identical to SEQ ID NO: 29753

SEQ ID NO: 29786 - DNA, 29757 bp, SARS Coronavirus; identical to SEQ ID NO: 29769

SEQ ID NO: 29787 - DNA, 29740 bp, SARS Coronavirus; identical to SEQ ID NO: 29770

SEQ ID NO: 29788 - DNA, 29732 bp, SARS Coronavirus; identical to SEQ ID NO: 29771

SEQ ID NO: 29789 - DNA, 29736 bp, SARS Coronavirus
ctacccaggaaaagccaaccaacctcgatctcttgtagatctgttctctaaacgaactttaaaatctgtgtagctgtcgctcggctgcatgcctagtgcacctacgcagtataaacaataataaattttactgtcgttgacaagaaacgagtaactcgtccctcttctgcagactgcttacggtttcgtccgtgttgcagtcgatcatcagcatacctaggtttcgtccgggtgtgaccgaaaggtaagatggagagccttgttcttggtgtcaacgagaaaacacacgtccaactcagtttgcctgtccttcaggttagagacgtgctagtgcgtggcttcggggactctgtggaagaggccctatcggaggcacgtgaacacctcaaaaatggcacttgtggtctagtagagctggaaaaaggcgtactgccccagcttgaacagccctatgtgttcattaaacgttctgatgccttaagcaccaatcacggccacaaggtcgttgagctggttgcagaaatggacggcattcagtacggtcgtagcggtataacactgggagtactcgtgccacatgtgggcgaaaccccaattgcataccgcaatgttcttcttcgtaagaacggtaataagggagccggtggtcatagctatggcatcgatctaaagtcttatgacttaggtgacgagcttggcactgatcccattgaagattatgaacaaaactggaacactaagcatggcagtggtgcactccgtgaactcactcgtgagctcaatggaggtgcagtcactcgctatgtcgacaacaatttctgtggcccagatgggtaccctcttgattgcatcaaagattttctcgcacgcgcgggcaagtcaatgtgcactctttccgaacaacttgattacatcgagtcgaagagaggtgtctactgctgccgtgaccatgagcatgaaattgcctggttcactgagcgctctgataagagctacgagcaccagacacccttcgaaattaagagtgccaagaaatttgacactttcaaaggggaatgcccaaagtttgtgtttcctcttaactcaaaagtcaaagtcattcaaccacgtgttgaaaagaaaaagactgagggtttcatggggcgtatacgctctgtgtaccctgttgcatctccacaggagtgtaacaatatgcacttgtctaccttgatgaaatgtaatcattgcgatgaagtttcatggcagacgtgcgactttctgaaagccacttgtgaacattgtggcactgaaaatttagttattgaaggacctactacatgtgggtacctacctactaatgctgtagtgaaaatgccatgtcctgcctgtcaagacccagagattggacctgagcatagtgttgcagattatcacaaccactcaaacattgaaactcgactccgcaagggaggtaggactagatgttttggaggctgtgtgtttgcctatgttggctgctataataagcgtgcctactgggttcctcgtgctagtgctgatattggctcaggccatactggcattactggtgacaatgtggagaccttgaatgaggatctccttgagatactgagtcgtgaacgtgttaacattaacattgttggcgattttcatttgaatgaagaggttgccatcattttggcatctttctctgcttctacaagtgcctttattgacactataaagagtcttgattacaagtctttcaaaaccattgttgagtcctgcggtaactataaagttaccaagggaaagcccgtaaaaggtgcttggaacattggacaacagagatcagttttaacaccactgtgtggttttccctcacaggctgctggtgttatcagatcaatttttgcgcgcacacttgatgcagcaaaccactcaattcctgatttgcaaagagcagctgtcaccatacttgatggtatttctgaacagtcattacgtcttgtcgacgccatggtttatacttcagacctgctcaccaacagtgtcattattatggcatatgtaactggtggtcttgtacaacagacttctcagtggttgtctaatcttttgggcactactgttgaaaaactcaggcctatctttgaatggattgaggcgaaacttagtgcaggagttgaatttctcaaggatgcttgggagattctcaaatttctcattacaggtgtttttgacatcgtcaagggtcaaatacaggttgcttcagataacatcaaggattgtgtaaaatgcttcattgatgttgttaacaaggcactcgaaatgtgcattgatcaagtcactatcgctggcgcaaagttgcgatcactcaacttaggtgaagtcttcatcgctcaaagcaagggactttaccgtcagtgtatacgtggcaaggagcagctgcaactactcatgcctcttaaggcaccaaaagaagtaacctttcttgaaggtgattcacatgacacagtacttacctctgaggaggttgttctcaagaacggtgaactcgaagcactcgagacgcccgttgatagcttcacaaatggagctatcgttggcacaccagtctgtgtaaatggcctcatgctcttagagattaaggacaaagaacaatactgcgcattgtctcctggtttactggctacaaacaatgtctttcgcttaaaagggggtgcaccaattaaaggtgtaacctttggagaagatactgtttgggaagttcaaggttacaagaatgtgagaatcacatttgagcttgatgaacgtgttgacaaagtgcttaatgaaaagtgctctgtctacactgttgaatccggtaccgaagttactgagtttgcatgtgttgtagcagaggctgttgtgaagactttacaaccagtttctgatctccttaccaacatgggtattgatcttgatgagtggagtgtagctacattctacttatttgatgatgctggtgaagaaaacttttcatcacgtatgtattgttccttttaccctccagatgaggaagaagaggacgatgcagagtgtgaggaagaagaaattgatgaaacctgtgaacatgagtacggtacagaggatgattatcaaggtctccctctggaatttggtgcctcagctgaaacagttcgagttgaggaagaagaagaggaagactggctggatgatactactgagcaatcagagattgagccagaaccagaacctacacctgaagaaccagttaatcagtttactggttatttaaaacttactgacaatgttgccattaaatgtgttgacatcgttaaggaggcacaaagtgctaatcctatggtgattgtaaatgctgctaacatacacctgaaacatggtggtggtgtagcaggtgcactcaacaaggcaaccaatggtgccatgcaaaaggagagtgatgattacattaagctaaatggccctcttacagtaggagggtcttgtttgctttctggacataatcttgctaagaagtgtctgcatgttgttggacctaacctaaatgcaggtgaggacatccagcttcttaaggcagcatatgaaaatttcaattcacaggacatcttacttgcaccattgttgtcagcaggcatatttggtgctaaaccacttcagtctttacaagtgtgcgtgcagacggttcgtacacaggtttatattgcagtcaatgacaaagctctttatgagcaggttgtcatggattatcttgataacctgaagcctagagtggaagcacctaaacaagaggagccaccaaacacagaagattccaaaactgaggagaaatctgtcgtacagaagcctgtcgatgtgaagccaaaaattaaggcctgcattgatgaggttaccacaacactggaagaaactaagtttcttaccaataagttactcttgtttgctgatatcaatggtaagctttaccatgattctcagaacatgcttagaggtgaagatatgtctttccttgagaaggatgcaccttacatggtaggtgatgttatcactagtggtgatatcacttgtgttgtaataccctccaaaaaggctggtggcactactgagatgctctcaagagctttgaagaaagtgccagttgatgagtatataaccacgtaccctggacaaggatgtgctggttatacacttgaggaagctaagactgctcttaagaaatgcaaatctgcattttatgtactaccttcagaagcacctaatgctaaggaagagattctaggaactgtatcctggaatttgagagaaatgcttgctcatgctgaagagacaagaaaattaatgcctatatgcatggatgttagagccataatggcaaccatccaacgtaagtataaaggaattaaaattcaagagggcatcgttgactatggtgtccgattcttcttttatactagtaaagagcctgtagcttctattattacgaagctgaactctctaaatgagccgcttgtcacaatgccaattggttatgtgacacatggttttaatcttgaagaggctgcgcgctgtatgcgttctcttaaagctcctgccgtagtgtcagtatcatcaccagatgctgttactacatataatggatacctcacttcgtcatcaaagacatctgaggagcactttgtagaaacagtttctttggctggctcttacagagattggtcctattcaggacagcgtacagagttaggtgttgaatttcttaagcgtggtgacaaaattgtgtaccacactctggagagccccgtcgagtttcatcttgacggtgaggttctttcacttgacaaactaaagagtctcttatccctgcgggaggttaagactataaaagtgttcacaactgtggacaacactaatctccacacacagcttgtggatatgtctatgacatatggacagcagtttggtccaacatacttggatggtgctgatgttacaaaaattaaacctcatgtaaatcatgagggtaagactttctttgtactacctagtgatgacacactacgtagtgaagctttcgagtactaccatactcttgatgagagttttcttggtaggtacatgtctgctttaaaccacacaaagaaatggaaatttcctcaagttggtggtttaacttcaattaaatgggctgataacaattgttatttgtctagtgttttattagcacttcaacagcttgaagtcaaattcaatgcaccagcacttcaagaggcttattatagagcccgtgctggtgatgctgctaacttttgtgcactcatactcgcttacagtaataaaactgttggcgagcttggtgatgtcagagaaactatgacccatcttctacagcatgctaatttggaatctgcaaagcgagttcttaatgtggtgtgtaaacattgtggtcagaaaactactaccttaacgggtgtagaagctgtgatgtatatgggtactctatcttatgataatcttaagacaggtgtttccattccatgtgtgtgtggtcgtgatgctacacaatatctagtacaacaagagtcttcttttgttatgatgtctgcaccacctgctgagtataaattacagcaaggtacattcttatgtgcgaatgagtacactggtaactatcagtgtggtcattacactcatataactgctaaggagaccctctatcgtattgacggagctcaccttacaaagatgtcagagtacaaaggaccagtgactgatgttttctacaaggaaacatcttacactacaaccatcaagcctgtgtcgtataaactcgatggagttacttacacagagattgaaccaaaattggatgggtattataaaaaggataatgcttactatacagagcagcctatagaccttgtaccaactcaaccattaccaaatgcgagttttgataatttcaaactcacatgttctaacacaaaatttgctgatgatttaaatcaaatgacaggcttcacaaagccagcttcacgagagctatctgtcacattcttcccagacttgaatggcgatgtagtggctattgactatagacactattcagcgagtttcaagaaaggtgctaaattactgcataagccaattgtttggcacattaaccaggctacaaccaagacaacgttcaaaccaaacacttggtgtttacgttgtctttggagtacaaagccagtagatacttcaaattcatttgaagttctggcagtagaagacacacaaggaatggacaatcttgcttgtgaaagtcaacaacccacctctgaagaagtagtggaaaatcctaccatacagaaggaagtcatagagtgtgacgtgaaaactaccgaagttgtaggcaatgtcatacttaaaccatcagatgaaggtgttaaagtaacacaagagttaggtcatgaggatcttatggctgcttatgtggaaaacacaagcattaccattaagaaacctaatgagctttcactagccttaggtttaaaaacaattgccactcatggtattgctgcaattaatagtgttccttggagtaaaattttggcttatgtcaaaccattcttaggacaagcagcaattacaacatcaaattgcgctaagagattagcacaacgtgtgtttaacaattatatgccttatgtgtttacattattgttccaattgtgtacttttactaaaagtaccaattctagaattagagcttcactacctacaactattgctaaaaatagtgttaagagtgttgctaaattatgtttggatgccggcattaattatgtgaagtcacccaaattttctaaattgttcacaatcgctatgtggctattgttgttaagtatttgcttaggttctctaatctgtgtaactgctgcttttggtgtactcttatctaattttggtgctccttcttattgtaatggcgttagagaattgtatcttaattcgtctaacgttactactatggatttctgtgaaggttcttttccttgcagcatttgtttaagtggattagactcccttgattcttatccagctcttgaaaccattcaggtgacgatttcatcgtacaagctagacttgacaattttaggtctggccgctgagtgggttttggcatatatgttgttcacaaaattcttttatttattaggtctttcagctataatgcaggtgttctttggctattttgctagtcatttcatcagcaattcttggctcatgtggtttatcattagtattgtacaaatggcacccgtttctgcaatggttaggatgtacatcttctttgcttctttctactacatatggaagagctatgttcatatcatggatggttgcacctcttcgacttgcatgatgtgctataagcgcaatcgtgccacacgcgttgagtgtacaactattgttaatggcatgaagagatctttctatgtctatgcaaatggaggccgtggcttctgcaagactcacaattggaattgtctcaattgtgacacattttgcactggtagtacattcattagtgatgaagttgctcgtgatttgtcactccagtttaaaagaccaatcaaccctactgaccagtcatcgtatattgttgatagtgttgctgtgaaaaatggcgcgcttcacctctactttgacaaggctggtcaaaagacctatgagagacatccgctctcccattttgtcaatttagacaatttgagagctaacaacactaaaggttcactgcctattaatgtcatagtttttgatggcaagtccaaatgcgacgagtctgcttctaagtctgcttctgtgtactacagtcagctgatgtgccaacctattctgttgcttgaccaagctcttgtatcagacgttggagatagtactgaagtttccgttaagatgtttgatgcttatgtcgacaccttttcagcaacttttagtgttcctatggaaaaacttaaggcacttgttgctacagctcacagcgagttagcaaagggtgtagctttagatggtgtcctttctacattcgtgtcagctgcccgacaaggtgttgttgataccgatgttgacacaaaggatgttattgaatgtctcaaactttcacatcactctgacttagaagtgacaggtgacagttgtaacaatttcatgctcacctataataaggttgaaaacatgacgcccagagatcttggcgcatgtattgactgtaatgcaaggcatatcaatgcccaagtagcaaaaagtcacaatgtttcactcatctggaatgtaaaagactacatgtctttatctgaacagctgcgtaaacaaattcgtagtgctgccaagaagaacaacataccttttagactaacttgtgctacaactagacaggttgtcaatgtcataactactaaaatctcactcaagggtggtaagattgttagtacttgttttaaacttatgcttaaggccacattattgtgcgttcttgctgcattggtttgttatatcgttatgccagtacatacattgtcaatccatgatggttacacaaatgaaatcattggttacaaagccattcaggatggtgtcactcgtgacatcatttctactgatgattgttttgcaaataaacatgctggttttgacgcatggtttagccagcgtggtggttcatacaaaaatgacaaaagctgccctgtagtagctgctatcattacaagagagattggtttcatagtgcctggcttaccgggtactgtgctgagagcaatcaatggtgacttcttgcattttctacctcgtgtttttagtgctgttggcaacatttgctacacaccttccaaactcattgagtatagtgattttgctacctctgcttgcgttcttgctgctgagtgtacaatttttaaggatgctatgggcaaacctgtgccatattgttatgacactaatttgctagagggttctatttcttatagtgagcttcgtccagacactcgttatgtgcttatggatggttccatcatacagtttcctaacacttacctggagggttctgttagagtagtaacaacttttgatgctgagtactgtagacatggtacatgcgaaaggtcagaagtaggtatttgcctatctaccagtggtagatgggttcttaataatgagcattacagagctctatcaggagttttctgtggtgttgatgcgatgaatctcatagctaacatctttactcctcttgtgcaacctgtgggtgctttagatgtgtctgcttcagtagtggctggtggtattattgccatattggtgacttgtgctgcctactactttatgaaattcagacgtgtttttggtgagtacaaccatgttgttgctgctaatgcacttttgtttttgatgtctttcactatactctgtctggtaccagcttacagctttctgccgggagtctactcagtcttttacttgtacttgacattctatttcaccaatgatgtttcattcttggctcaccttcaatggtttgccatgttttctcctattgtgcctttttggataacagcaatctatgtattctgtatttctctgaagcactgccattggttctttaacaactatcttaggaaaagagtcatgtttaatggagttacatttagtaccttcgaggaggctgctttgtgtacctttttgctcaacaaggaaatgtacctaaaattgcgtagcgagacactgttgccacttacacagtataacaggtatcttgctctatataacaagtacaagtatttcagtggagccttagatactaccagctatcgtgaagcagcttgctgccacttagcaaaggctctaaatgactttagcaactcaggtgctgatgttctctaccaaccaccacagacatcaatcacttctgctgttctgcagagtggttttaggaaaatggcattcccgtcaggcaaagttgaagggtgcatggtacaagtaacctgtggaactacaactcttaatggattgtggttggatgacacagtatactgtccaagacatgtcatttgcacagcagaagacatgcttaatcctaactatgaagatctgctcattcgcaaatccaaccatagctttcttgttcaggctggcaatgttcaacttcgtgttattggccattctatgcaaaattgtctgcttaggcttaaagttgatacttctaaccctaagacacccaagtataaatttgtccgtatccaacctggtcaaacattttcagttctagcatgctacaatggttcaccatctggtgtttatcagtgtgccatgagacctaatcataccattaaaggttctttccttaatggatcatgtggtagtgttggttttaacattgattatgattgcgtgtctttctgctatatgcatcatatggagcttccaacaggagtacacgctggtactgacttagaaggtaaattctatggtccatttgttgacagacaaactgcacaggctgcaggtacagacacaaccataacattaaatgttttggcatggctgtatgctgctgttatcaatggtgataggtggtttcttaatagattcaccactactttgaatgactttaaccttgtggcaatgaagtacaactatgaacctttgacacaagatcatgttgacatattgggacctctttctgctcaaacaggaattgccgtcttagatatgtgtgctgctttgaaagagctgctgcagaatggtatgaatggtcgtactatccttggtagcactattttagaagatgagtttacaccatttgatgttgttagacaatgctctggtgttaccttccaaggtaagttcaagaaaattgttaagggcactcatcattggatgcttttaactttcttgacatcactattgattcttgttcaaagtacacagtggtcactgtttttctttgtttacgagaatgctttcttgccatttactcttggtattatggcaattgctgcatgtgctatgctgcttgttaagcataagcacgcattcttgtgcttgtttctgttaccttctcttgcaacagttgcttactttaatatggtctacatgcctgctagctgggtgatgcgtatcatgacatggcttgaattggctgacactagcttgtctggttataggcttaaggattgtgttatgtatgcttcagctttagttttgcttattctcatgacagctcgcactgtttatgatgatgctgctagacgtgtttggacactgatgaatgtcattacacttgtttacaaagtctactatggtaatgctttagatcaagctatttccatgtgggccttagttatttctgtaacctctaactattctggtgtcgttacgactatcatgtttttagctagagctatagtgtttgtgtgtgttgagtattacccattgttatttattactggcaacaccttacagtgtatcatgcttgtttattgtttcttaggctattgttgctgctgctactttggccttttctgtttactcaaccgttacttcaggcttactcttggtgtttatgactacttggtctctacacaagaatttaggtatatgaactcccaggggcttttgcctcctaagagtagtattgatgctttcaagcttaacattaagttgttgggtattggaggtaaaccatgtatcaaggttgctactgtacagtctaaaatgtctgacgtaaagtgcacatctgtggtactgctctcggttcttcaacaacttagagtagagtcatcttctaaattgtgggcacaatgtgtacaactccacaatgatattcttcttgcaaaagacacaactgaagctttcgagaagatggtttctcttttgtctgttttgctatccatgcagggtgctgtagacattaataggttgtgcgaggaaatgctcgataaccgtgctactcttcaggctattgcttcagaatttagttctttaccatcatatgccgcttatgccactgcccaggaggcctatgagcaggctgtagctaatggtgattctgaagtcgttctcaaaaagttaaagaaatctttgaatgtggctaaatctgagtttgaccgtgatgctgccatgcaacgcaagttggaaaagatggcagatcaggctatgacccaaatgtacaaacaggcaagatctgaggacaagagggcaaaagtaactagtgctatgcaaacaatgctcttcactatgcttaggaagcttgataatgatgcacttaacaacattatcaacaatgcgcgtgatggttgtgttccactcaacatcataccattgactacagcagccaaactcatggttgttgtccctgattatggtacctacaagaacacttgtgatggtaacacctttacatatgcatctgcactctgggaaatccagcaagttgttgatgcggatagcaagattgttcaacttagtgaaattaacatggacaattcaccaaatttggcttggcctcttattgttacagctctaagagccaactcagctgttaaactacagaataatgaactgagtccagtagcactacgacagatgtcctgtgcggctggtaccacacaaacagcttgtactgatgacaatgcacttgcctactataacaattcgaagggaggtaggtttgtgctggcattactatcagaccaccaagatctcaaatgggctagattccctaagagtgatggtacaggtacaatttacacagaactggaaccaccttgtaggtttgttacagacacaccaaaagggcctaaagtgaaatacttgtacttcatcaaaggcttaaacaacctaaatagaggtatggtgctgggcagtttagctgctacagtacgtcttcaggctggaaatgctacagaagtacctgccaattcaactgtgctttccttctgtgcttttgcagtagaccctgctaaagcatataaggattacctagcaagtggaggacaaccaatcaccaactgtgtgaagatgttgtgtacacacactggtacaggacaggcaattactgtaacaccagaagctaacatggaccaagagtcctttggtggtgcttcatgttgtctgtattgtagatgccacattgaccatccaaatcctaaaggattctgtgacttgaaaggtaagtacgtccaaatacctaccacttgtgctaatgacccagtgggttttacacttagaaacacagtctgtaccgtctgcggaatgtggaaaggttatggctgtagttgtgaccaactccgcgaacccttgatgcagtctgcggatgcatcaacgtttttaaacgggtttgcggtgtaagtgcagcccgtcttacaccgtgcggcacaggcactagtactgatgtcgtctacagggcttttgatatttacaacgaaaaagttgctggttttgcaaagttcctaaaaactaattgctgtcgcttccaggagaaggatgaggaaggcaatttattagactcttactttgtagttaagaggcatactatgtctaactaccaacatgaagagactatttataacttggttaaagattgtccagcggttgctgtccatgactttttcaagtttagagtagatggtgacatggtaccacatatatcacgtcagcgtctaactaaatacacaatggctgatttagtctatgctctacgtcattttgatgagggtaattgtgatacattaaaagaaatactcgtcacatacaattgctgtgatgatgattatttcaataagaaggattggtatgacttcgtagagaatcctgacatcttacgcgtatatgctaacttaggtgagcgtgtacgccaatcattattaaagactgtacaattctgcgatgctatgcgtgatgcaggcattgtaggcgtactgacattagataatcaggatcttaatgggaactggtacgatttcggtgatttcgtacaagtagcaccaggctgcggagttcctattgtggattcatattactcattgctgatgcccatcctcactttgactagggcattggctgctgagtcccatatggatgctgatctcgcaaaaccacttattaagtgggatttgctgaaatatgattttacggaagagagactttgtctcttcgaccgttattttaaatattgggaccagacataccatcccaattgtattaactgtttggatgataggtgtatccttcattgtgcaaactttaatgtgttattttctactgtgtttccacctacaagttttggaccactagtaagaaaaatatttgtagatggtgttccttttgttgtttcaactggataccattttcgtgagttaggagtcgtacataatcaggatgtaaacttacatagctcgcgtctcagtttcaaggaacttttagtgtatgctgctgatccagctatgcatgcagcttctggcaatttattgctagataaacgcactacatgcttttcagtagctgcactaacaaacaatgttgcttttcaaactgtcaaacccggtaattttaataaagacttttatgactttgctgtgtctaaaggtttctttaaggaaggaagttctgttgaactaaaacacttcttctttgctcaggatggcaacgctgctatcagtgattatgactattatcgttataatctgccaacaatgtgtgatatcagacaactcctattcgtagttgaagttgttgataaatactttgattgttacgatggtggctgtattaatgccaaccaagtaatcgttaacaatctggataaatcagctggtttcccatttaataaatggggtaaggctagactttattatgactcaatgagttatgaggatcaagatgcacttttcgcgtatactaagcgtaatgtcatccctactataactcaaatgaatcttaagtatgccattagtgcaaagaatagagctcgcaccgtagctggtgtctctatctgtagtactatgacaaatagacagtttcatcagaaattattgaagtcaatagccgccactagaggagctactgtggtaattggaacaagcaagttttacggtggctggcataatatgttaaaaactgtttacagtgatgtagaaactccacaccttatgggttgggattatccaaaatgtgacagagccatgcctaacatgcttaggataatggcctctcttgttcttgctcgcaaacataacacttgctgtaacttatcacaccgtttctacaggttagctaacgagtgtgcgcaagtattaagtgagatggtcatgtgtggcggctcactatatgttaaaccaggtggaacatcatccggtgatgctacaactgcttatgctaatagtgtctttaacatttgtcaagctgttacagccaatgtaaatgcacttctttcaactgatggtaataagatagctgacaagtatgtccgcaatctacaacacaggctctatgagtgtctctatagaaatagggatgttgatcatgaattcgtggatgagttttacgcttacctgcgtaaacatttctccatgatgattctttctgatgatgccgttgtgtgctataacagtaactatgcggctcaaggtttagtagctagcattaagaactttaaggcagttctttattatcaaaataatgtgttcatgtctgaggcaaaatgttggactgagactgaccttactaaaggacctcacgaattttgctcacagcatacaatgctagttaaacaaggagatgattacgtgtacctgccttacccagatccatcaagaatattaggcgcaggctgttttgtcgatgatattgtcaaaacagatggtacacttatgattgaaaggttcgtgtcactggctattgatgcttacccacttacaaaacatcctaatcaggagtatgctgatgtctttcacttgtatttacaatacattagaaagttacatgatgagcttactggccacatgttggacatgtattccgtaatgctaactaatgataacacctcacggtactgggaacctgagttttatgaggctatgtacacaccacatacagtcttgcaggctgtaggtgcttgtgtattgtgcaattcacagacttcacttcgttgcggtgcctgtattaggagaccattcctatgttgcaagtgctgctatgaccatgtcatttcaacatcacacaaattagtgttgtctgttaatccctatgtttgcaatgccccaggttgtgatgtcactgatgtgacacaactgtatctaggaggtatgagctattattgcaagtcacataagcctcccattagttttccattatgtgctaatggtcaggtttttggtttatacaaaaacacatgtgtaggcagtgacaatgtcactgacttcaatgcgatagcaacatgtgattggactaatgctggcgattacatacttgccaacacttgtactgagagactcaagcttttcgcagcagaaacgctcaaagccactgaggaaacatttaagctgtcatatggtattgccactgtacgcgaagtactctctgacagagaattgcatctttcatgggaggttggaaaacctagaccaccattgaacagaaactatgtctttactggttaccgtgtaactaaaaatagtaaagtacagattggagagtacacctttgaaaaaggtgactatggtgatgctgttgtgtacagaggtactacgacatacaagttgaatgttggtgattactttgtgttgacatctcacactgtaatgccacttagtgcacctactctagtgccacaagagcactatgtgagaattactggcttgtacccaacactcaacatctcagatgagttttctagcaatgttgcaaattatcaaaaggtcggcatgcaaaagtactctacactccaaggaccacctggtactggtaagagtcattttgccatcggacttgctctctattacccatctgctcgcatagtgtatacggcatgctctcatgcagctgttgatgccctatgtgaaaaggcattaaaatatttgcccatagataaatgtagtagaatcatacctgcgcgtgcgcgcgtagagtgttttgataaattcaaagtgaattcaacactagaacagtatgttttctgcactgtaaatgcattgccagaaacaactgctgacattgtagtctttgatgaaatctctatggctactaattatgacttgagtgttgtcaatgctagacttcgtgcaaaacactacgtctatattggcgatcctgctcaattaccagccccccgcacattgctgactaaaggcacactagaaccagaatattttaattcagtgtgcagacttatgaaaacaataggtccagacatgttccttggaacttgtcgccgttgtcctgctgaaattgttgacactgtgagtgctttagtttatgacaataagctaaaagcacacaaggataagtcagctcaatgcttcaaaatgttctacaaaggtgttattacacatgatgtttcatctgcaatcaacagacctcaaataggcgttgtaagagaatttcttacacgcaatcctgcttggagaaaagctgtttttatctcaccttataattcacagaacgctgtagcttcaaaaatcttaggattgcctacgcagactgttgattcatcacagggttctgaatatgactatgtcatattcacacaaactactgaaacagcacactcttgtaatgtcaaccgcttcaatgtggctatcacaagggcaaaaattggcattttgtgcataatgtctgatagagatctttatgacaaactgcaatttacaagtctagaaataccacgtcgcaatgtggctacattacaagcagaaaatgtaactggactttttaaggactgtagtaagatcattactggtcttcatcctacacaggcacctacacacctcagcgttgatataaagttcaagactgaaggattatgtgttgacataccaggcataccaaaggacatgacctaccgtagactcatctctatgatgggtttcaaaatgaattaccaagtcaatggttaccctaatatgtttatcacccgcgaagaagctattcgtcacgttcgtgcgtggattggctttgatgtagagggctgtcatgcaactagagatgctgtgggtactaacctacctctccagctaggattttctacaggtgttaacttagtagctgtaccgactggttatgttgacactgaaaataacacagaattcaccagagttaatgcaaaacctccaccaggtgaccagtttaaacatcttataccactcatgtataaaggcttgccctggaatgtagtgcgtattaagatagtacaaatgctcagtgatacactgaaaggattgtcagacagagtcgtgttcgtcctttgggcgcatggctttgagcttacatcaatgaagtactttgtcaagattggacctgaaagaacgtgttgtctgtgtgacaaacgtgcaacttgcttttctacttcatcagatacttatgcctgctggaatcattctgtgggttttgactatgtctataacccatttatgattgatgttcagcagtggggctttacgggtaaccttcagagtaaccatgaccaacattgccaggtacatggaaatgcacatgtggctagttgtgatgctatcatgactagatgtttagcagtccatgagtgctttgttaagcgcgttgattggtctgttgaataccctattataggagatgaactgagggttaattctgcttgcagaaaagtacaacacatggttgtgaagtctgcattgcttgctgataagtttccagttcttcatgacattggaaatccaaaggctatcaagtgtgtgcctcaggctgaagtagaatggaagttctacgatgctcagccatgtagtgacaaagcttacaaaatagaggaactcttctattcttatgctacacatcacgataaattcactgatggtgtttgtttgttttggaattgtaacgttgatcgttacccagccaatgcaattgtgtgtaggtttgacacaagagtcttgtcaaacttgaacttaccaggctgtgatggtggtagtttgtatgtgaataagcatgcattccacactccagctttcgataaaagtgcatttactaatttaaagcaattgcctttcttttactattctgatagtccttgtgagtctcatggcaaacaagtagtgtcggatattgattatgttccactcaaatctgctacgtgtattacacgatgcaatttaggtggtgctgtttgcagacaccatgcaaatgagtaccgacagtacttggatgcatataatatgatgatttctgctggatttagcctatggatttacaaacaatttgatacttataacctgtggaatacatttaccaggttacagagtttagaaaatgtggcttataatgttgttaataaaggacactttgatggacacgccggcgaagcacctgtttccatcattaataatgctgtttacacaaaggtagatggtattgatgtggagatctttgaaaataagacaacacttcctgttaatgttgcatttgagctttgggctaagcgtaacattaaaccagtgccagagattaagatactcaataatttgggtgttgatatcgctgctaatactgtaatctgggactacaaaagagaagccccagcacatgtatctacaataggtgtctgcacaatgactgacattgccaagaaacctactgagagtgcttgttcttcacttactgtcttgtttgatggtagagtggaaggacaggtagacctttttagaaacgcccgtaatggtgttttaataacagaaggttcagtcaaaggtctaacaccttcaaagggaccagcacaagctagcgtcaatggagtcacattaattggagaatcagtaaaaacacagtttaactactttaagaaagtagacggcattattcaacagttgcctgaaacctactttactcagagcagagacttagaggattttaagcccagatcacaaatggaaactgactttctcgagctcgctatggatgaattcatacagcgatataagctcgagggctatgccttcgaacacatcgtttatggagatttcagtcatggacaacttggcggtcttcatttaatgataggcttagccaagcgctcacaagattcaccacttaaattagaggattttatccctatggacagcacagtgaaaaattacttcataacagatgcgcaaacaggttcatcaaaatgtgtgtgttctgtgattgatcttttacttgatgactttgtcgagataataaagtcacaagatttgtcagtgatttcaaaagtggtcaaggttacaattgactatgctgaaatttcattcatgctttggtgtaaggatggacatgttgaaaccttctacccaaaactacaagcaagtcaagcgtggcaaccaggtgttgcgatgcctaacttgtacaagatgcaaagaatgcttcttgaaaagtgtgaccttcagaattatggtgaaaatgctgttataccaaaaggaataatgatgaatgtcgcaaagtatactcaactgtgtcaatacttaaatacacttactttagctgtaccctacaacatgagagttattcactttggtgctggctctgataaaggagttgcaccaggtacagctgtgctcagacaatggttgccaactggcacactacttgtcgattcagatcttaatgacttcgtctccgacgcagattctactttaattggagactgtgcaacagtacatacggctaataaatgggaccttattattagcgatatgtatgaccctaggaccaaacatgtgacaaaagagaatgactctaaagaagggtttttcacttatctgtgtggatttataaagcaaaaactagccctgggtggttctatagctgtaaagataacagagcattcttggaatgctgacctttacaagcttatgggccatttctcatggtggacagcttttgttacaaatgtaaatgcatcatcatcggaagcatttttaattggggctaactatcttggcaagccgaaggaacaaattgatggctataccatgcatgctaactacattttctggaggaacacaaatcctatccagttgtcttcctattcactctttgacatgagcaaatttcctcttaaattaagaggaactgctgtaatgtctcttaaggagaatcaaatcaatgatatgatttattctcttctggaaaaaggtaggcttatcattagagaaaacaacagagttgtggtttcaagtgatattcttgttaacaactaaacgaacatgtttattttcttattatttcttactctcactagtggtagtgaccttgaccggtgcaccacttttgatgatgttcaagctcctaattacactcaacatacttcatctatgaggggggtttactatcctgatgaaatttttagatcagacactctttatttaactcaggatttatttcttccattttattctaatgttacagggtttcatactattaatcatacgtttggcaaccctgtcataccttttaaggatggtatttattttgctgccacagagaaatcaaatgttgtccgtggttgggtttttggttctaccatgaacaacaagtcacagtcggtgattattattaacaattctactaatgttgttatacgagcatgtaactttgaattgtgtgacaaccctttctttgctgtttctaaacccatgggtacacagacacatactatgatattcgataatgcatttaattgcactttcgagtacatatctgatgccttttcgcttgatgtttcagaaaagtcaggtaattttaaacacttacgagagtttgtgtttaaaaataaagatgggtttctctatgtttataagggctatcaacctatagatgtagttcgtgatctaccttctggttttaacactttgaaacctatttttaagttgcctcttggtattaacattacaaattttagagccattcttacagccttttcacctgctcaagacatttggggcacgtcagctgcagcctattttgttggctatttaaagccaactacatttatgctcaagtatgatgaaaatggtacaatcacagatgctgttgattgttctcaaaatccacttgctgaactcaaatgctctgttaagagctttgagattgacaaaggaatttaccagacctctaatttcagggttgttccctcaggagatgttgtgagattccctaatattacaaacttgtgtccttttggagaggtttttaatgctactaaattcccttctgtctatgcatgggagagaaaaaaaatttctaattgtgttgctgattactctgtgctctacaactcaacatttttttcaacctttaagtgctatggcgtttctgccactaagttgaatgatctttgcttctccaatgtctatgcagattcttttgtagtcaagggagatgatgtaagacaaatagcgccaggacaaactggtgttattgctgattataattataaattgccagatgatttcatgggttgtgtccttgcttggaatactaggaacattgatgctacttcaactggtaattataattataaatataggtatcttagacatggcaagcttaggccctttgagagagacatatctaatgtgcctttctcccctgatggcaaaccttgcaccccacctgctcttaattgttattggccattaaatgattatggtttttacaccactactggcattggctaccaaccttacagagttgtagtactttcttttgaacttttaaatgcaccggccacggtttgtggaccaaaattatccactgaccttattaagaaccagtgtgtcaattttaattttaatggactcactggtactggtgtgttaactccttcttcaaagagatttcaaccatttcaacaatttggccgtgatgtttctgatttcactgattccgttcgagatcctaaaacatctgaaatattagacatttcaccttgctcttttgggggtgtaagtgtaattacacctggaacaaatgcttcatctgaagttgctgttctatatcaagatgttaactgcactgatgtttctacagcaattcatgcagatcaactcacaccagcttggcgcatatattctactggaaacaatgtattccagactcaagcaggctgtcttataggagctgagcatgtcgacacttcttatgagtgcgacattcctattggagctggcatttgtgctagttaccatacagtttctttattacgtagtactagccaaaaatctattgtggcttatactatgtctttaggtgctgatagttcaattgcttactctaataacaccattgctatacctactaacttttcaattagcattactacagaagtaatgcctgtttctatggctaaaacctccgtagattgtaatatgtacatctgcggagattctactgaatgtgctaatttgcttctccaatatggtagcttttgcacacaactaaatcgtgcactctcaggtattgctgctgaacaggatcgcaacacacgtgaagtgttcgctcaagtcaaacaaatgtacaaaaccccaactttgaaatattttggtggttttaatttttcacaaatattacctgaccctctaaagccaactaagaggtcttttattgaggacttgctctttaataaggtgacactcgctgatgctggcttcatgaagcaatatggcgaatgcctaggtgatattaatgctagagatctcatttgtgcgcagaagttcaatggacttacagtgttgccacctctgctcactgatgatatgattgctgcctacactgctgctctagttagtggtactgccactgctggatggacatttggtgctggcgctgctcttcaaataccttttgctatgcaaatggcatataggttcaatggcattggagttacccaaaatgttctctatgagaaccaaaaacaaatcgccaaccaatttaacaaggcgattagtcaaattcaagaatcacttacaacaacatcaactgcattgggcaagctgcaagacgttgttaaccagaatgctcaagcattaaacacacttgttaaacaacttagctctaattttggtgcaatttcaagtgtgctaaatgatatcctttcgcgacttgataaagtcgaggcggaggtacaaattgacaggttaattacaggcagacttcaaagccttcaaacctatgtaacacaacaactaatcagggctgctgaaatcagggcttctgctaatcttgctgctactaaaatgtctgagtgtgttcttggacaatcaaaaagagttgacttttgtggaaagggctaccaccttatgtccttcccacaagcagccccgcatggtgttgtcttcctacatgtcacgtatgtgccatcccaggagaggaacttcaccacagcgccagcaatttgtcatgaaggcaaagcatacttccctcgtgaaggtgtttttgtgtttaatggcacttcttggtttattacacagaggaacttcttttctccacaaataattactacagacaatacatttgtctcaggaaattgtgatgtcgttattggcatcattaacaacacagtttatgatcctctgcaacctgagcttgactcattcaaagaagagctggacaagtacttcaaaaatcatacatcaccagatgttgatcttggcgacatttcaggcattaacgcttctgtcgtcaacattcaaaaagaaattgaccgcctcaatgaggtcgctaaaaatttaaatgaatcactcattgaccttcaagaattgggaaaatatgagcaatatattaaatggccttggtatgtttggctcggcttcattgctggactaattgccatcgtcatggttacaatcttgctttgttgcatgactagttgttgcagttgcctcaagggtgcatgctcttgtggttcttgctgcaagtttgatgaggatgactctgagccagttctcaagggtgtcaaattacattacacataaacgaacttatggatttgtttatgagattttttactcttggatcaattactgcacagccagtaaaaattgacaatgcttctcctgcaagtactgttcatgctacagcaacgataccgctacaagcctcactccctttcggatggcttgttattggcgttgcatttcttgctgtttttcagagcgctaccaaaataattgcgctcaataaaagatggcagctagccctttataagggcttccagttcatttgcaatttactgctgctatttgttaccatctattcacatcttttgcttgtcgctgcaggtatggaggcgcaatttttgtacctctatgccttgatatattttctacaatgcatcaacgcatgtagaattattatgagatgttggctttgttggaagtgcaaatccaagaacccattactttatgatgccaactactttgtttgctggcacacacataactatgactactgtataccatataacagtgtcacagatacaattgtcgttactgaaggtgacggcatttcaacaccaaaactcaaagaagactaccaaattggtggttattctgaggataggcactcaggtgttaaagactatgtcgttgtacatggctatttcaccgaagtttactaccagcttgagtctacacaaattactacagacactggtattgaaaatgctacattcttcatctttaacaagcttgttaaagacccaccgaatgtgcaaatacacacaatcgacggctcttcaggagttgctaatccagcaatggatccaatttatgatgagccgacgacgactactagcgtgcctttgtaagcacaagaaagtgagtacgaacttatgtactcattcgtttcggaagaaacaggtacgttaatagttaatagcgtacttctttttcttgctttcgtggtattcttgctagtcacactagccatccttactgcgcttcgattgtgtgcgtactgctgcaatattgttaacgtgagtttagtaaaaccaacggtttacgtctactcgcgtgttaaaaatctgaactcttctgaaggagttcctgatcttctggtctaaacgaactaactattattattattctgtttggaactttaacattgcttatcatggcagacaacggtactattaccgttgaggagcttaaacaactcctggaacaatggaacctagtaataggtttcctatgcctagcctggattatgttactacaatttgcctattctaatcggaacaggtttttgtacataataaagcttgttttcctctggctcttgtggccagtaacacttgcttgttttgtgcttgctgctgtctacagaattaattgggtgactggcgggattgcgattgcaatggcttgtattgtaggcttgatgtggcttagctacttcgttgcttccttcaggctgtttgctcgtacccgctcaatgtggtcattcaacccagaaacaaacattcttctcaatgtgcctctccgggggacaattgtgaccagaccgctcatggaaagtgaacttgtcattggtgctgtgatcattcgtggtcacttgcgaatggccggacactccctagggcgctgtgacattaaggacctgccaaaagagatcactgtggctacatcacgaacgctttcttattacaaattaggagcgtcgcagcgtgtaggcactgattcaggttttgctgcatacaaccgctaccgtattggaaactataaattaaatacagaccacgccggtagcaacgacaatattgctttgctagtacagtaagtgacaacagatgtttcatcttgttgacttccaggttacaatagcagagatattgattatcattatgaggactttcaggattgctatttggaatcttgacgttataataagttcaatagtgagacaattatttaagcctctaactaagaagaattattcggagttagatgatgaagaacctatggagttagattatccataaaacgaacatgaaaattattctcttcctgacattgattgtatttacatcttgcgagctatatcactatcaggagtgtgttagaggtacgactgtactactaaaagaaccttgcccatcaggaacatacgagggcaattcaccatttcaccctcttgctgacaataaatttgcactaacttgcactagcacacactttgcttttgcttgtgctgacggtactcgacatacctatcagctgcgtgcaagatcagtttcaccaaaacttttcatcagacaagaggaggttcaacaagagctctactcgccactttttctcattgttgctgctctagtatttttaatactttgcttcaccattaagagaaagacagaatgaatgagctcactttaattgacttctatttgtgctttttagcctttctgctattccttgttttaataatgcttattatattttggttttcactcgaaatccaggatctagaagaaccttgtaccaaagtctaaacgaacatgaaacttctcattgttttgacttgtatttctctatgcagttgcatatgcactgtagtacagcgctgtgcatctaataaacctcatgtgcttgaagatccttgtaaggtacaacactaggggtaatacttatagcactgcttggctttgtgctctaggaaaggttttaccttttcatagatggcacactatggttcaaacatgcacacctaatgttactatcaactgtcaagatccagctggtggtgcgcttatagctaggtgttggtaccttcatgaaggtcaccaaactgctgcatttagagacgtacttgttgttttaaataaacgaacaaattaaaatgtctgataatggaccccaatcaaaccaacgtagtgccccccgcattacatttggtggacccacagattcaactgacaataaccagaatggaggacgcaatggggcaaggccaaaacagcgccgaccccaaggtttacccaataatactgcgtcttggttcacagctctcactcagcatggcaaggaggaacttagattccctcgaggccagggcgttccaatcaacaccaatagtggtccagatgaccaaattggctactaccgaagagctacccgacgagttcgtggtggtgacggcaaaatgaaagagctcagccccagatggtacttctattacctaggaactggcccagaagcttcacttccctacggcgctaacaaagaaggcatcgtatgggttgcaactgagggagccttgaatacacccaaagaccacattggcacccgcaatcctaataacaatgctgccaccgtgctacaacttcctcaaggaacaacattgccaaaaggcttctacgcagagggaagcagaggcggcagtcaagcctcttctcgctcctcatcacgtagtcgctgtaattcaagaaattcaactcctggcagcagtaggggaaattctcctgctcgaatggctagcggaggtggtgaaactgccctcgcgctattgctgctagacagattgaaccagcttgagagcaaagtttctggtaaaggccaacaacaacaaggccaaactgtcactaagaaatctgctgctgaggcatctaaaaagcctcgccaaaaacgtactgccacaaaacagtacaacgtcactcaagcatttgggagacgtggtccagaacaaacccaaggaaatttcggggaccaagacctaatcagacaaggaactgattacaaacattggccgcaaattgcacaatttgctccaagtgcctctgcattctttggaatgtcacgcattggcatggaagtcacaccttcgggaacatggctgacttatcatggagccattaaattggatgacaaagatccacaattcaaagacaacgtcatactgctgaacaagcacattgacgcatacaaaacattcccaccaacagagcctaaaaaggacaaaaagaaaaagactgatgaagctcagcctttgccgcagagacaaaagaagcagcccactgtgactcttcttcctgcggctgacatggatgatttctccagacaacttcaaaattccatgagtggagcttctgctgattcaactcaggcataaacactcatgatgaccacacaaggcagatgggctatgtaaacgttttcgcaattccgtttacgatacatagtctactcttgtgcagaatgaattctcgtaactaaacagcacaagtaggtttagttaactttaatctcacatagcaatctttaatcaatgtgtaacattagggaggacttgaaagagccaccacattttcatcgaggccacgcggagtacgatcgagggtacagtgaataatgctagggagagctgcctatatggaagagccctaatgtgtaaaattaattttagtagtgctatccccatgtgattttaatagcttcttaggagaatgacaaaaaaaaaaaaaaaaaaaaaaaa

SEQ ID NO: 29790 - DNA, 29711 bp, SARS Coronavirus; identical to SEQ ID NO: 29759

SEQ ID NO: 29791 - DNA, 29705 bp, SARS Coronavirus; identical to SEQ ID NO: 29758

SEQ ID NO: 29792 - DNA, 29711 bp, SARS Coronavirus; identical to SEQ ID NO: 29757

SEQ ID NO: 29793 - DNA, 29706 bp, SARS Coronavirus; identical to SEQ ID NO: 29756
  misc_feature 20688: n = A,T,C or G

SEQ ID NO: 29794 - DNA, 29711 bp, SARS Coronavirus; identical to SEQ ID NO: 29779

SEQ ID NO: 29795 - DNA, 29715 bp, SARS Coronavirus; identical to SEQ ID NO: 29760

SEQ ID NO: 29796 - DNA, 29741 bp, SARS Coronavirus
ctacccaggaaaagccaaccaacctcgatctcttgtagatctgttctctaaacgaactttaaaatctgtgtagctgtcgctcggctgcatgcctagtgcacctacgcagtataaacaataataaattttactgtcgttgacaagaaacgagtaactcgtccctcttctgcagactgcttacggtttcgtccgtgttgcagtcgatcatcagcatacctaggtttcgtccgggtgtgaccgaaaggtaagatggagagccttgttcttggtgtcaacgagaaaacacacgtccaactcagtttgcctgtccttcaggttagagacgtgctagtgcgtggcttcggggactctgtggaagaggccctatcggaggcacgtgaacacctcaaaaatggcacttgtggtctagtagagctggaaaaaggcgtactgccccagcttgaacagccctatgtgttcattaaacgttctgatgccttaagcaccaatcacggccacaaggtcgttgagctggttgcagaaatggacggcattcagtacggtcgtagcggtataacactgggagtactcgtgccacatgtgggcgaaaccccaattgcataccgcaatgttcttcttcgtaagaacggtaataagggagccggtggtcatagctatggcatcgatctaaagtcttatgacttaggtgacgagcttggcactgatcccattgaagattatgaacaaaactggaacactaagcatggcagtggtgcactccgtgaactcactcgtgagctcaatggaggtgcagtcactcgctatgtcgacaacaatttctgtggcccagatgggtaccctcttgattgcatcaaagattttctcgcacgcgcgggcaagtcaatgtgcactctttccgaacaacttgattacatcgagtcgaagagaggtgtctactgctgccgtgaccatgagcatgaaattgcctggttcactgagcgctctgataagagctacgagcaccagacacccttcgaaattaagagtgccaagaaatttgacactttcaaaggggaatgcccaaagtttgtgtttcctcttaactcaaaagtcaaagtcattcaaccacgtgttgaaaagaaaaagactgagggtttcatggggcgtatacgctctgtgtaccctgttgcatctccacaggagtgtaacaacatgcacttgtctaccttgatgaaatgtaatcattgcgatgaagtttcatggcagacgtgcgactttctgaaagccacttgtgaacattgtggcactgaaaatttagttattgaaggacctactacatgtgggtacctacctactaatgctgtagtgaaaatgccatgtcctgcctgtcaagacccagagattggacctgagcatagtgttgcagattatcacaaccactcaaacattgaaactcgactccgcaagggaggtaggactagatgttttggaggctgtgtgtttgcctatgttggctgctataataagcgtgcctactgggttcctcgtgctagtgctgatattggctcaggccatactggcattactggtgacaatgtggagaccttgaatgaggatctccttgagatactgagtcgtgaacgtgttaacattaacattgttggcgattttcatttgaatgaagaggttgccatcattttggcatctttctctgcttctacaagtgcctttattgacactataaagagtcttgattacaagtctttcaaaaccattgttgagtcctgcggtaactataaagttaccaagggaaagcccgtaaaaggtgcttggaacattggacaacagagatcagttttaacaccactgtgtggttttccctcacaggctgctggtgttatcagatcaattttttcgcgcacacttgatgcagcaaaccactcaattcctgatttgcaaagagcagctgtcaccatacttgatggtatttctgaacagtcattacgtcttgtcgacgccatggtttatacttcagacctgctcaccaacagtgtcattattatggcatatgtaactggtggtcttgtacaacagacttctcagtggttgtctaatcttttgggcactactgttgaaaaactcaggcctatctttgaatggattgaggcgaaacttagtgcaggagttgaatttctcaaggatgcttgggagattctcaaatttctcattacaggtgtttttgacatcgtcaagggtcaaatacaggttgcttcagataacatcaaggattgtgtaaaatgcttcattgatgttgttaacaaggcactcgaaatgtgcattgatcaagtcactatcgctggcgcaaagttgcgatcactcaacttaggtgaagtcttcatcgctcaaagcaagggactttaccgtcagtgtatacgtggcaaggagcagctgcaactactcatgcctcttaaggcaccaaaagaagtaacctttcttgaaggtgattcacatgacacagtacttacctctgaggaggttgttctcaagaacggtgaactcgaagcactcgagacgcccgttgatagcttcacaaatggagctatcgttggcacaccagtctgtgtaaatggcctcatgctcttagagattaaggacaaagaacaatactgcgcattgtctcctggtttactggctacaaacaatgtctttcgcttaaaagggggtgcaccaattaaaggtgtaacctttggagaagatactgtttgggaagttcaaggttacaagaatgtgagaatcacatttgagcttgatgaacgtgttgacaaagtgcttaatgaaaagtgctctgtctacactgttgaatccggtaccgaagttactgagtttgcatgtgttgtagcagaggctgttgtgaagactttacaaccagtttctgatctccttaccaacatgggtattgatcttgatgagtggagtgtagctacattctacttatttgatgatgctggtgaagaaaacttttcatcacgtatgtattgttccttttaccctccagatgaggaagaagaggacgatgcagagtgtgaggaagaagaaattgatgaaacctgtgaacatgagtacggtacagaggatgattatcaaggtctccctctggaatttggtgcctcagctgaaacagttcgagttgaggaagaagaagaggaagactggctggatgatactactgagcaatcagagattgagccagaaccagaacctacacctgaagaaccagttaatcagtttactggttatttaaaacttactgacaatgttgccattaaatgtgctgacatcgttaaggaggcacaaagtgctaatcctatggtgattgtaaatgctgctaacatacacctgaaacatggtggtggtgtagcaggtgcactcaacaaggcaaccaatggtgccatgcaaaaggagagtgatgattacattaagctaaatggccctcttacagtaggagggtcttgtttgctttctggacataatcttgctaagaagtgtctgcatgttgttggacctaacctaaatgcaggtgaggacatccagcttcttaaggcagcatatgaaaatttcaattcacaggacaccttacttgcaccattgttgtcagcaggcatatttggtgctaaactacttcagtctttacaagtgtgcgtgcagacggttcgtacacaggtttatattgcagtcaatgacaaagctctttatgagcaggttgtcatggattatcttgataacctgaagcctagagtggaagcacctaaacaagaggagccaccaaacacagaagattccaaaactgaggagaaatctgtcgtacagaagcctgtcgatgtgaagccaaaaattaaggcctgcattgatgaggttaccacaacactggaagaaactaagtttcttaccaataagttactcttgtttgctgatatcaatggtaagctttaccatgattctcagaacatgcttagaggtgaagatatgtctttccttgagaaggatgcaccttacatggtaggtgatgttatcactagtggtgatatcacttgtgttgtaataccctccaaaaaggctggtggcactactgagatgctctcaagagctttgaagaaagtgccagttgatgagtatataaccacgtaccctggacaaggatgtgctggttatacacttgaggaagctaagactgctcttaagaaatgcaaatctgcattttatgtactaccttcagaagcacctaatgctaaggaagagattctaggaactgtatcctggaatttgagagaaatgcttgctcatgctgaagagacaagaaaattaatgcctatatgcatggatgttagagccataatggcaaccatccaacgtaagtataaaggaattaaaattcaagagggcatcgttgactatggtgtccgattcttcttttatactagtaaagagcctgtagcttctattattacgaagctgaactctctaaatgagccgcttgtcacaatgccaattggttatgtgacacatggttttaatcttgaagaggctgcgcgctgtatgcgttctcttaaagctcctgccgtagtgtcagtatcatcaccagatgctgttactacatataatggatacctcacttcgtcatcaaagacatctgaggagcactttgtagaaacagtttctttggctggctcttacagagattggtcctattcaggacagcgtacagagttaggtgttgaatttcttaagcgtggtgacaaaattgtgtaccacactctggagagccccgtcgagtttcatcttgacggtgaggttctttcacttgacaaactaaagagtctcttatccctgcgggaggttaagactataaaagtgttcacaactgtggacaacactaatctccacacacagcttgtggatatgtctatgacatatggacagcagtttggtccaacatacttggatggtgctgatgttacaaaaattaaacctcatgtaaatcatgagggtaagactttctttgtactacctagtgatgacacactacgtagtgaagctttcgagtactaccatactcttgatgagagttttcttggtaggtacatgtctgctttaaaccacacaaagaaatggaaatttcctcaagttggtggtttaacttcaattaaatgggctgataacaattgttatttgtctagtgttttattagcacttcaacagattgaagtcaaattcaatgcaccagcacttcaagaggcttattatagagcccgtgctggtgatgctgctaacttttgtgcactcatactcgcttacagtaataaaactgttggcgagcttggtgatgtcagagaaactatgacccatcttctacagcatgctaatttggaatctgcaaagcgagttcttaatgtggtgtgtaaacattgtggtcagaaaactactaccttaacgggtgtagaagctgtgatgtatatgggtactctatcttatgataatcttaagacaggtgtttccattccatgtgtgtgtggtcgtgatgctacacaatatctagtacaacaagagtcttcttttgttatgatgtctgcaccacctgctgagtataaattacagcaaggtacattcttatgtgcgaatgagtacactggtaactatcagtgtggtcattacactcatataactgctaaggagaccctctatcgtattgacggagctcaccttacaaagatgtcagagtacaaaggaccagtgactgatgttttctacaaggaaacatcttacactacaaccatcaagcctgtgtcgtataaactcgatggagttacttacacagagattgaaccaaaattggatgggtattataaaaaggataatgcttactatacagagcagcctatagaccttgtaccaactcaaccattaccaaatgcgagttttgataatttcaaactcacatgttctaacacaaaatttgctgatgatttaaatcaaatgacaggcttcacaaagccagcttcacgagagctatctgtcacattcttcccagacttgaatggcgatgtagtggctattgactatagacactattcagcgagtttcaagaaaggtgctaaattactgcataagccaattgtttggcacattaaccaggctacaaccaagacaacgttcaaaccaaacacttggtgtttacgttgtctttggagtacaaagccagtagatacttcaaattcatttgaagttctggcagtagaagacacacaaggaatggacaatcttgcttgtgaaagtcaacaacccacctctgaagaagtagtggaaaatcctaccatacagaaggaagtcatagagtgtgacgtgaaaactaccgaagttgtaggcaatgtcatacttaaaccatcagatgaaggtgttaaagtaacgcaagagttaggtcatgaggatcttatggctgcttatgtggaaaacacaagcattaccattaagaaacctaatgagctttcactagccttaggtttaaaaacaattgccactcatggtattgctgcaattaatagtgttccttggagtaaaatttttgcttatgtcaaaccattcttaggacaagcagcaattacaacatcaaattgcgctaagagattagcacaacgtgtgtttaacaattatatgccttatgtgtttacattattgttccaattgtgtacttttactaaaagtaccaattctagaattagagcttcactacctacaactattgctaaaaatagtgttaagagtgttgctaaattatgtttggatgccggcattaattatgtgaagtcacccaaattttctaaattgttcacaatcgctatgtggctattgttgttaagtatttgcttaggttctctaatctatgtaactgctgcttttggtgtactcttatctaattttggtgctccttcttattgtaatggcgttagagaattgtatcttaattcgtctaacgttactactatggatttctgtgaaggttcttttccttgcagcatttgttcaagtggattagactcccttgattcttatccagctcttgaaaccattcaggtgacgatttcatcgtacaagctagacttgacaattttaggtctggccgctgagtgggttttggcatatatgttgttcacaaaattcttttatttattaggtctttcagctataatgcaggtgttctttggctattttgctagtcatttcatcagcaattcttggctcatgtggtttatcattagtattgtacaaatggcacccgtttctgcaatggttaggatgtacatcttctttgcttctttctactacatatggaagagctatgttcatatcatggatggttgcacctcttcgacttgcatgatgtgctataagcgcaatcgtgccacacgcgttgagtgtacaactattgttaatggcatgaagagatctttctatgtctatgcaaatggaggccgtggcttctgcaagactcacaattggaattgtctcaattgtgacacattttgcactggtagtacattcattagtgatgaagttgctcgtgatttgtcactccagtttaaaagaccaatcaaccctactgaccagtcatcgtatattgttgatagtgttgctgtgaaaaatggcgcgcttcacctctactttgacaaggctggtcaaaagacctatgagagacatccgctctcccattttgtcaatttagacaatttgagagctaacaacactaaaggttcactgcctattaatgtcatagtttttgatggcaagtccaaatgcgacgagtctgcttctaagtctgcttctgtgtactacagtcagctgatgtgccaacctattctgttgcttgaccaagctcttgtatcagacgttggagatagtactgaagtttccgttaagatgtttgatgcttatgtcgacaccttttcagcaacttttagtgttcctatggaaaaacttaaggcacttgttgctacagctcacagcgagttagcaaagggtgtagctttagatggtgtcctttctacattcgtgtcagctgcccgacaaggtgttgttgataccgatgttgacacaaaggatgttattgaatgtctcaaactttcacatcactctgacttagaagtgacaggtgacagttgtaacaatttcatgctcacctataataaggttgaaaacatgacgcccagagatcttggcgcatgtattgactgtaatgcaaggcatatcaatgcccaagtagcaaaaagtcacaatgtttcactcatctggaatgtaaaagactacatgtctttatctgaacagctgcgtaaacaaattcgtagtgctgccaagaagaacaacataccttttagactaacttgtgctacaactagacaggttgtcaatgtcataactactaaaatctcactcaagggtggtaagattgttagtacttggtttaaacttatgcttaaggccacattattgtgcgttcttgctgcattggtttgttacatcgttatgccagtacatacattgtcaatccatgatggttacacaaatgaaatcattggttacaaagccattcaggatggtgtcactcgtgacatcatttctactgatgattgttttgcaaataaacatgctggttttgacgcatggtttagccagcgtggtggttcatacaaaaatgacaaaagctgccctgtagtagctgctatcattacaagagagattggtttcatagtgcctggcttaccgggtactgtgctgagagcaatcaatggtgacttcttgcattttctacctcgtgtttttagtgctgttggcaacatttgctacacaccttccaaactcattgagtatagtgattttgctacctctgcttgcgttcttgctgctgagtgtacaatttttaaggatgctatgggcaaacctgtgccatattgttatgacactaatttgctagagggttctatttcttatagtgagcttcgtccagacactcgttatgtgcttatggatggttccatcatacagtttcctaacacttacctggagggttctgttagagtagtaacaacttttgatgctgagtactgtagacatggtacatgcgaaaggtcagaagcaggtatttgcctatctaccagtggtagatgggttcttaataatgagcattacagagctctatcaggagttttctgtggtgttgatgcgatgaatctcatagctaacatctttactcctcttgtgcaacctgtgggtgctttagatgtgtctgcttcagtagtggctggtggtattattgccatattggtgacttgtgctgcctactactttatgaaattcagacgtgcttttggtgagtacaaccatgttgttgctgctaatgcacttttgtttttgatgtctttcactatactctgtctggcaccagcttacagctttctgccgggagtctactcagtcttttacttgtacttgacattctatttcaccaatgatgtttcattcttggctcaccttcaatggtttgccatgttttctcctattgtgcctttttggataacagcaatctatgtattctgtatttctctgaagcactgccattggttctttaacaactatcttaggaaaagagtcatgtttaatggagttacatttagtaccttcgaggaggctgctttgtgtacctttttgctcaacaaggaaatgtacctaaaattgcgtagcgagacactgttgccacttacacagtataacaggtatcttgctctatataacaagtacaagtatttcagtggagccttagatactaccagctatcgtgaagcagcttgctgccacttagcaaaggctctaaatgactttagcaactcaggtgctgatgttctctaccaaccaccacagacatcaatcacttctgctgttctgcagagtggttttaggaaaatggcattcccgtcaggcaaagttgaagggtgcatggtacaagtaacctgtggaactacaactcttaatggattgtggttggatgacacagtatactgtccaagacatgtcatttgcacagcagaagacatgcttaatcctaactatgaagatctgctcattcgcaaatccaaccatagctttcttgttcaggctggcaatgttcaacttcgtgttattggccattctatgcaaaattgtctgcttaggcttaaagttgatacttctaaccctaagacacccaagtataaatttgtccgtatccaacctggtcaaacattttcagttctagcatgctacaatggttcaccatctggtgtttatcagtgtgccatgagacctaatcataccattaaaggttctttccttaatggatcatgtggtagtgttggttttaacattgattatgattgcgtgtctttctgctatatgcatcatatggagcttccaacaggagtacacgctggtactgacttagaaggtaaattctatggtccatttgttgacagacaaactgcacaggctgcaggtacagacacaaccataacattaaatgttttggcatggctgtatgctgctgttatcaatggtgataggtggtttcttaatagattcaccactactttgaatgactttaaccttgtggcaatgaagtacaactatgaacctttgacacaagatcatgttgacatattgggacctctttctgctcaaacaggaattgccgtcttagatatgtgtgctgctttgaaagagctgctgcagaatggtatgaatggtcgtactatccttggtagcactattttagaagatgagtttacaccatttgatgttgttagacaatgctctggtgttaccttccaaggtaagttcaagaaaattgttaagggcactcatcattggatgcttttaactttcttgacatcactattgattcttgttcaaagtacacagtggtcactgtttttctttgtttacgagaatgctttcttgccatttactcttggtattatggcaattgctgcatgtgctatgctgcttgttaagcataagcacgcattcttgtgcttgtttctgttaccttctcttgcaacagttgcttactttaatatggtctacatgcctgctagctgggtgatgcgtatcatgacatggcttgaattggctgacactagcttgtctggttataggcttaaggattgtgttatgtatgcttcagctttagttttgcttattctcatgacagctcgcactgtttatgatgatgctgctagacgtgtttggacactgatgaatgtcattacacttgtttacaaagtctactatggtaatgctttagatcaagctatttccatgtgggccttagttatttctgtaacctctaactattctggtgtcgttacgactatcatgtttttagctagagctatagtgtttgtgtgtgttgagtattacccattgttatttattactggcaacaccttacagtgtatcatgcttgtttattgtttcttaggctattgttgctgctgctactttggccttttctgtttactcaaccgttacttcaggcttactcttggtgtttatgactacttggtctctacacaagaatttaggtatatgaactcccaggggcttttgcctcctaagagtagtattgatgctttcaagcttaacattaagttgttgggtattggaggtaaaccatgtatcaaggttgctactgtacagtctaaaatgtctgacgtaaagtgcacatctgtggtactgctctcggttcttcaacaacttagagtagagtcatcttctaaattgtgggcacaatgtgtacaactccacaatgatattcttcttgcaaaagacacaactgaagctttcgagaagatggtttctcttttgtctgttttgctatccatgcagggtgctgtagacattaataggttgtgcgaggaaatgctcgataaccgtgctactcttcaggctattgcttcagaatttagttctttaccatcatatgccgcttatgccactgcccaggaggcctatgagcaggctgtagctaatggtgattctgaagtcgttctcaaaaagttaaagaaatctttgaatgtggctaaatctgagtttgaccgtgatgctgccatgcaacgcaagttggaaaagatggcagatcaggctatgacccaaatgtacaaacaggcaagatctgaggacaagagggcaaaagtaactagtgctatgcaaacaatgctcttcactatgcttaggaagcttgataatgatgcacttaacaacattatcaacaatgcgcgtgatggttgtgttccactcaacatcataccattgactacagcagccaaactcatggttgttgtccctgattatggtacctacaagaacacttgtgatggtaacacctttacatatgcatctgcactctgggaaatccagcaagttgttgatgcggatagcaagattgttcaacttagtgaaattaacatggacaattcaccaaatttggcttggcctcttattgttacagctctaagagccaactcagctgttaaactacagaataatgaactgagtccagtagcactacgacagatgtcctgtgcggctggtaccacacaaacagcttgtactgatgacaatgcacttgcctactataacaattcgaagggaggtaggtttgtgctggcattactatcagaccaccaagatctcaaatgggctagattccctaagagtgatggtacaggtacaatttacacagaactggaaccaccttgtaggtttgttacagacacaccaaaagggcctaaagtgaaatacttgtacttcatcaaaggcttaaacaacctaaatagaggtatggtgctgggcagtttagctgctacagtacgtcttcaggctggaaatgctacagaagtacctgccaattcaactgtgctttccttctgtgcttttgcagtagaccctgctaaagcatataaggattacctagcaagtggaggacaaccaatcaccaactgtgtgaagatgttgtgtacacacactggtacaggacaggcaattactgtaacaccagaagctaacatggaccaagagtcctttggtggtgcttcatgttgtctgtattgtagatgccacattgaccatccaaatcctaaaggattctgtgacttgaaaggtaagtacgtccaaatacctaccacttgtgctaatgacccagtgggttttacacttagaaacacagtctgtaccgtctgcggaatgtggaaaggttatggctgtagttgtgaccaactccgcgaacccttgatgcagtctgcggatgcatcaacgtttttaaacgggtttgcggtgtaagtgcagcccgtcttacaccgtgcggcacaggcactagtactgatgtcgtctacagggcttttgatatttacaacgaaaaagttgctggttttgcaaagttcctaaaaactaattgctgtcgcttccaggagaaggatgaggaaggcaatttattagactcttactttgtagttaagaggcatactatgtctaactaccaacatgaagagactatttataacttggttaaagattgtccagcggttgctgtccatgactttttcaagtttagagtagatggtgacatggtaccacatatatcacgtcagcgtctaactaaatacacaatggctgatttagtctatgctctacgtcattttgatgagggtaattgtgatacattaaaagaaatactcgtcacatacaattgctgtgatgatgattatttcaataagaaggattggtatgatttcgtagagaatcctgacatcttacgcgtatatgctaacttaggtgagcgtgtacgccaatcattattaaagactgtacaattctgcgatgctatgcgtgatgcaggcattgtaggcgtactgacattagataatcaggatcttaatgggaactggtacgatttcggtgatttcgtacaagtagcaccaggctgcggagttcctattgtggattcatattactcattgctgatgcccatcctcactttgactagggcattggctgctgagtcccatatggatgctgatctcgcaaaaccacttattaagtgggatttgctgaaatatgattttacggaagagagactttgtctcttcgaccgttattttaaatattgggaccagacataccatcccaattgtattaactgtttggatgataggtgtatccttcattgtgcaaactttaatgtgttattttctactgtgtttccacctacaagttttggaccactagtaagaaaaatatttgtagatggtgttccttttgttgtttcaactggataccattttcgtgagttaggagtcgtacataatcaggatgtaaacttacatagctcgcgtctcagtttcaaggaacttttagtgtatgctgctgatccagctatgcatgcagcttctggcaatttattgctagataaacgcactacatgcttttcagtagctgcactaacaaacaatgttgcttttcaaactgtcaaacccggtaattttaataaagacttttatgactttgctgtgtctaaaggtttctttaaggaaggaagttctgttgaactaaaacacttcttctttgctcaggatggcaacgctgctatcagtgattatgactattatcgttataatctgccaacaatgtgtgatatcagacaactcctattcgtagttgaagttgttgataaatactttgattgttacgatggtggctgtattaatgccaaccaagtaatcgttaacaatctggataaatcagctggtttcccatttaataaatggggtaaggctagactttattatgactcaatgagttatgaggatcaagatgcacttttcgcgtatactaagcgtaatgtcatccctactataactcaaatgaatcttaagtatgccattagtgcaaagaatagagctcgcaccgtagctggtgtctctatctgtagtactatgacaaatagacagtttcatcagaaattattgaagtcaatagccgccactagaggagctactgtggtaattggaacaagcaagttttacggtggctggcataatatgttaaaaactgtttacagtgatgtagaaactccacaccttatgggttgggattatccaaaatgtgacagagccatgcctaacatgcttaggataatggcctctcttgttcttgctcgcaaacataacacttgctgtaacttatcacaccgtttctacaggttagctaacgagtgtgcgcaagtattaagtgagatggtcatgtgtggcggctcactatatgttaaaccaggtggaacatcatccggtgatgctacaactgcttatgctaatagtgtctttaacatttgtcaagctgttacagccaatgtaaatgcacttctttcaactgatggtaataagatagctgacaagtatgtccgcaatctacaacacaggctctatgagtgtctctatagaaatagggatgttgatcatgaattcgtgggtgagttttacgcttacctgcgtaaacatttctccatgatgattctttctgatgatgccgttgtgtgctataacagtaactatgcggctcaaggtttagtagctagcattaagaactttaaggcagttctttattatcaaaataatgtgttcatgtctgaggcaaaatgttggactgagactgaccttactaaaggacctcacgaattttgctcacagcatacaatgctagttaaacaaggagatgattacgtgtacctgccttacccagatccatcaagaatattaggcgcaggctgttttgtcgatgatattgtcaaaacagatggtacacttatgattgaaaggtttgtgtcactggctattgatgcttacccacttacaaaacatcctaatcaggagtatgctgatgtctttcacttgtatttacaatacattagaaagttacatgatgagcttactggccacatgttggacatgtattccgtaatgctaactaatgataacacctcacggtactgggaacctgagttttatgaggctatgtacacaccacatacagtcttgcaggctgtaggtgcttgtgtattgtgcaattcacagacttcacttcgttgcggtgcctgtattaggagaccattcctatgttgcaagtgctgctatgaccatgtcatttcaacatcacacaaattagtgttgtctgttaatccctatgtttgcaatgccccaggttgtgatgtcactgatgtgacacaactgtatctaggaggtatgagctattattgcaagtcacataagcctcccattagttttccattatgtgctaatggtcaggtttttggtttatacaaaaacacatgtgtaggcagtgacaatgtcactgacttcaatgcgatagcaacatgtgattggactaatgctggcgattacatacttgccaacacgtgtactgagagactcaagcttttcgcagcagaaacgctcaaagccactgaggaaacatttaagctgtcatatggtattgccactgtacgcgaagtactctctgacagagaattgcatctttcatgggaggttggaaaacctagaccaccattgaacagaaactatgtctttactggttaccgtgtaactaaaaatagtaaagtacagattggagagtacacctttgaaaaaggtgactatggtgatgctgttgtgtacagaggtactacgacatacaagttgaatgttggtgattactttgtgttgacatctcacactgtaatgccacttagtgcacctactctagtgccacaagagcactatgtgagaattactggcttgtacccaacactcaacatctcagatgagttttctagcaatgttgcaaattatcaaaaggtcggcatgcaaaagtactctacactccaaggaccacctggtactggtaagagtcattttgccatcggacttgctctctattacccatctgctcgcatagtgtatacggcatgctctcatgcagctgttgatgccctatgtgaaaaggcattaaaatatttgcccatagataaatgtagtagaatcatacctgcgcgtgcgcgcgtagagtgttttgataaattcaaagtgaattcaacactagaacagtatgttttctgcactgtaaatgcattgccagaaacaactgctgacattgtagtctttgatgaaatctctatggctactaattatgacttgagtgttgtcaatgctagacttcgtgcaaaacactacgtctatattggcgatcctgctcaattaccagccccccgcacattgctgactaaaggcacactagaaccagaatattttaattcagtgtgcagacttatgaaaacaataggtccagacatgttccttggaacttgtcgccgttgtcctgctgaaattgttgacactgtgagtgctttagtttatgacaataagctaaaagcacacaaggagaagtcagctcaatgcttcaaaatgttctacaaaggtgttattacacatgatgtttcatctgcaatcaacagacctcaaataggcgttgtaagagaatttcttacacgcaatcctgcttggagaaaagctgtttttatctcaccttataattcacagaatgctgtagcttcaaaaatcttaggattgcctacgcagactgttgattcatcacagggttctgaatatgactatgtcatattcacacaaactactgaaacagcacactcttgtaatgtcaaccgcttcaatgtggctatcacaagggcaaaaattggcattttgtgcataatgtctgatagagatctttatgacaaactgcaatttacaagtctagaaataccacgtcgcaatgtggctacattacaagcagaaaatgtaactggactttttaaggactgtagtaagatcattactggtcttcatcctacacaggcacctacacacctcagcgttgatataaagttcaagactgaaggattatgtgttgacataccaggcataccaaaggacatgacctaccgtagactcatctctatgatgggtttcaaaatgaattaccaagtcaatggttaccctaatatgtttatcacccgcgaagaagctattcgtcacgttcgtgcgtggattggctttgatgtagagggctgtcatgcaactagagatgctgtgggtactaacctacctctccagctaggattttctacaggtgttaacttagtagctgtaccgactggttatgttgacactgaaaataacacagaattcaccagagttaatgcaaaacctccaccaggtgaccagtttaaacatcttataccactcatgtataaaggcttgccctggaatgtagtgcgtattaagatagtacaaatgctcagtgatacactgaaaggattgtcagacagagtcgttttcgtcctttgggcgcatggctttgagcttacatcaatgaagtactttgtcaagattggacctgaaagaacgtgttgtctgtgtgacaaacgtgcaacttgcttttctacttcatcagatacttatgcctgctggaatcattctgtgggttttgactatgtctataacccatttatgattgatgttcagcagtggggctttacgggtaaccttcagagtaaccatgaccaacattgccaggtacatggaaatgcacatgtggctagttgtgatgctatcatgactagatgtttagcagtccatgagtgctttgttaagcgcgttgattggtctgttgaataccctattataggagatgaactgagggttaattctgcttgcagaaaagtacaacacatggttgtgaagtctgcattgcttgctgataagtttccagttcttcatgacattggaaatccaaaggctatcaagtgtgtgcctcaggctgaagtagaatggaagttctacgatgctcagccatgtagtgacaaagcttacaaaatagaggaactcttctattcttatgctacacatcacgataaattcactgatggtgtttgtttgttttggaattgtaacgttgatcgttacccagccaatgcaattgtgtgtaggtttgacacaagagtcttgtcaaacttgaacttaccaggctgtgatggtggtagtttgtatgtgaataagcatgcattccacactccagctttcgataaaagtgcatttactaatttaaagcaattgcctttcttttactattctgatagtccttgtgagtctcatggcaaacaagtagtgtcggatattgattatgttccactcaaatctgctacgtgtattacacgatgcaatttaggtggtgctgtttgcagacaccatgcaaatgagtaccgacagtacttggatgcatataatatgatgatttctgctggatttagcctatggatttacaaacaatttgatacttataacctgtggaatacatttaccaggttacagagtttagaaaatgtggcttataatgttgttaataaaggacactttgatggacacgccggcgaagcacctgtttccatcattaataatgctgtttacacaaaggtagatggtattgatgtggagatctttgaaaataagacaacacttcctgttaatgttgcatttgagctttgggctaagcgtaacattaaaccagtgccagagattaagatactcaataatttgggtgttgatatcgctgctaatactgtaatctgggactacaaaagagaagccccagcacatgtatctacaataggtgtctgcacaatgactgacattgccaagaaacctactgagagtgcttgttcttcacttactgtcttgtttgatggtagagtggaaggacaggtagacctttttagaaacgcccgtaatggtgttttaataacagaaggttcagtcaaaggtctaacaccttcaaagggaccagcacaagctagcgtcaatggagtcacattaattggagaatcagtaaaaacacagtttaactactttaagaaagtagacggcattattcaacagttgcctgaaacctactttactcagagcagagacttagaggattttaagcccagatcacaaatggaaactgactttctcgagctcgctatggatgaattcatacagcgatataagctcgagggctatgccttcgaacacatcgtttatggagatttcagtcatggacaacttggcggtcttcatttaatgataggcttagccaagcgctcacaagattcaccacttaaattagaggattttatccctatggacagcacagtgaaaaattacttcataacagatgcgcaaacaggttcatcaaaatgtgtgtgttctgtgattgatcttttacttgatgactttgtcgagataataaagtcacaagatttgtcagtgatttcaaaagtggtcaaggttacaattgactatgctgaaatttcattcatgctttggtgtaaggatggacatgttgaaaccttctacccaaaactacaagcaagtcaagcgtggcaaccaggtgttgcgatgcctaacttgtacaagatgcaaagaatgcttcttgaaaagtgtgaccttcagaattatggtgaaaatgctgttataccaaaaggaataatgatgaatgtcgcaaagtatactcaactgtgtcaatacttaaatacacttactttagctgtaccctacaacatgagagttattcactttggtgctggctctgataaaggagttgcaccaggtacagctgtactcagacaatggttgccaactggcacactacttgtcgattcagatcttaatgacttcgtctccgacgcagattctactttaattggagactgtgcaacagtacatacggctaataaatgggaccttattattagcgatatgtatgaccctaagaccaaacatgtgacaaaagagaatgactctaaagaagggtttttcacttatctgtgtggatttataaagcaaaaactagccctgggtggttctatagctgtaaagataacagagcattcttggaatgctgacctttacaagcttatgggccatttctcatggtggacagcttttgttacaaatgtaaatgcatcatcatcggaagcatttttaattggggctaactatcttggcaagccgaaggaacaaattgatggctataccatgcatgctaactacattttctggaggaacacaaatcctatccagttgtcttcctattcactctttgacatgagcaaatttcctcttaaattaagaggaactgctgtaatgtctcttaaggagaatcaaatcaatgatatgatttattctcttctggaaaaaggtaggcttatcattagagaaaacaacagagttgtggtttcaagtgatattcttgttaacaactaaacgaacatgtttattttcttattatttcttactctcactagtggtagtgaccttgaccggtgcaccacttttgatgatgttcaagctcctaattacactcaacatacttcatctatgaggggggtttactatcctgatgaaatttttagatcagacactctttatttaactcaggatttatttcttccattttattctaatgttacagggtttcatactattaatcatacgtttgacaaccctgtcataccttttaaggatggtatttattttgctgccacagagaaatcaaatgttgtccgtggttgggtttttggttctaccatgaacaacaagtcacagtcggtgattattattaacaattctactaatgttgttatacgagcatgtaactttgaattgtgtgacaaccctttctttgctgtttctaaacccatgggtacacagacacatactatgatattcgataatgcatttaattgcactttcgagtacatatctgatgccttttcgcttgatgtttcagaaaagtcaggtaattttaaacacttacgagagtttgtgtttaaaaataaagatgggtttctctatgtttataagggctatcaacctatagatgtagttcgtgatctaccttctggttttaacactttgaaacctatttttaagttgcctcttggtattaaaattacaaattttagagccattcttacagcctttttacctgctcaagacacttggggcacgtcagctgcagcctattttgttggctatttaaagccaactaaatttatgctcaagtatgatgaaaatggtacaatcacagatgctgttgattgttctcaaaatccacttgctgaactcaaatgctctgttaagagctttgagattgacaaaggaatttaccagacctctaatttcagggttgttccctcaggagatgttgtgagattccctaatattacaaacttgtgtccttttggagaggtttttaatgctactaaattcccttctgtctatgcatgggagaggaaaagaatttctaattgtgttgctgattactctgtgctctacaactcaacatctttttcaacctttaagtgctatggcgtttctgccactaagttgaatgatctttgcttctccaatgtctatgcagattcttttgtagtcaaaggagatgatgtaagacaaatagcgccaggacaaactggtgttattgctgattataattataaattgccagatgatttcatgggttgtgtccttgcttggaatactaggaacattgatgctacttcaactggtaattataattataaatataggtatcttagacatggcaagcttaggccctttgagagagacatatctaatgtgcctttctcccctgatggcaaaccttgcaccccacctgctcttaattgttattggccattaaaagattatggtttttacaccactagtggcattggctaccaaccttacagagttgtagtactttcttttgaacttttaaatgcaccggccacggtttgtggaccaaaattatccactgaccttattaagaaccagtgtgtcaattttaattttaatggactcactggtactggtgtgttaactccttcttcaaagagatttcaaccatttcaacaatttggccgtgatgtttctgatttcactgattccgttcgagatcctaaaacatctgaaatattagacatttcaccttgctcttttgggggtgtaagtgtaattacacctggaacaaatgcttcatctgaagttgctgttctatatcaagatgttaactgcactgatgttcctacagcaattcatgcagatcaactcacaccagcttggcgcatatattctactggaaacaatgtattccagactcaagcaggctgtcttataggagctgagcatgtcgacacttcttatgagtgcgacattcctattggagctggcatttgtgctagttaccatacagtttcttcattacgtagtactagccaaaaatctattgtggcttatactatgtctttaggtgctgatagttcaattgcttactctaataacaccattgctatacctactaactttttaattagcattactacagaagtaatgcctgtttctatggctaaaacctccgtagattgtaatatgtacatctgcggagattctactgaatgtgctaatttgcttctccaatatggtagcttttgcgcacaactaaatcgtgcactctcaggtattgctgttgaacaggatcgcaacacacgtgaagtgttcgctcaagtcaaacaaatgtacaaaaccccaactttgaaagattttggtggttttaatttttcacaaatattacctgaccctctaaagccaactaagaggtcttttattgaggacttgctctttaataaggtgacactcgctgatgctggcttcatgaagcaatatggcgaatgcctaggtgatattaatgctagagatctcatttgtgcgcagaagttcaatggacttacagtgttgccacctctgctcactgatgatatgattgctgcctacactgctgctctagttagtggtactgccactgctggatggacatttggtgctggcgctgctcttcaaataccttttgctatgcaaatggcatataggttcaatggcattggagttgcccaaaatgttctctatgagaaccaaaaacaaatcgccaaccaatttaacaaggcgattagtcaaattcaagaatcacttacaacaacatcaactgcattgggcaagctgcaagacgttgttaaccagaatgctcaagcattaaacacacttgttaaacaacttagctctaattttggtgcaatttcaagtgtgctaaatgatatcctttcgcgacttgataaagtcgaggcggaggtacaaattgacaggttaattacaggcagacttcaaagccttcaaacctatgtaacacaacaactaatcagggctgctgaaatcagggcttctgctaatcttgctgctactaaaatgtctgagtgtgttcttggacaatcaaaaagagttgacttttgcggaaagggctaccaccttatgtccttcccacaagcagccccgcatggtgttgtcttcctacatgtcacgtatgtgccatcccaggagaggaacttcaccacagcgccagcaatttgtcatgaaggcaaagcatacttccctcgtgaaggtgtttttgtgtttaatggcacttcttggtttattacacagaggaacttcttttctccacaaataattactacagacaatacatttgtctcaggaaattgtgatgtcgttattggcatcattaacaacacagtttatgatcctctgcaacctgagcttgactcattcaaagaagagctggacaagtacttcaaaaatcatacatcaccagatgttgatcttggcgacatttcaggcattaacgcttctgtcgtcaacattcaagaagaaattgaccgcctcaatgaggtcgctaaaaatttaaatgaatcactcattgaccttcaagaattgggaaaatatgagcaatatattaaatggccttggtatgtttggctcggcttcattgctggactaattgccatcgtcatggttacaatcttgctttgttgcatgactagttgttgcagttgcctcaagggtgcatgctcttgtggttcttgctgcaagtttgatgaggatgactctgagccagttctcaagggtgtcaaattacattacacataaacgaacttatggatttgtttatgagaatttttactcttggatcaattactgcacagccagtaaaaattgacaatgcttctcctgcaagtactgttcatgctacagcaacgataccgctacaagcctcactccctttcggatggcttgttattggcgttgcatttcttgctgtttttcagagcgctaccaaaataattgcgctcaataaaagatggcagctagccctttataagggcttccagttcattagcaatttactgctgctatttgttaccatctattcatatcttttgcttgtcgctgcaggtatggaggcgcaatttttgtacctctatgccttgatatattttctacaatgcatcaacgcaggtagaattattatgagatgttggctttgttggaagtgcaaatccaagaacccattactttatgatgccaactactttgtttgctggcacacacataactatgactactgtataccatataacagtgtcacagatacaattgtcgttactgaaggtgacggaatttcaacaccaaaactcaaagaagactaccaaattggtggttattctgaggataggcactcaggtgttaaagactatgtcgttgtacatggctatttcaccgaagtttactaccagcttgagtctacacaaattactacagacactggtattgaaaatgctacattcttcatctttaacaagcttgttaaagacccaccgaatgtgcaaatacacacaatcgacggctcttcaggagttgctaatccagcaatggatccaatttatgatgagccgacgacgactactagcgtgcctttgtaagcacaagaaagtgagtacgaacttatgtactcattcgtttcggaagaaacaggtacgttaatagttaatagcgtacttctttttcttgctttcgtggtattcttgctagtcacactagccatccttactgcgcttcgattgtgtgcgtactgctgcaatattgttaacgtgagtttagtaaaaccaacggtttacgtctactcgcgtgttaaaaatctgaactcttctgaaggagttcctgatcttctggtctaaacgaactaactattattattattctgtttggaactttaacattgcttatcatggcagacaacagtactattaccgttgaggagcttaaacaactcctggaacaatggaacctagtaataggtttcctattcctagcctggattatgttactacaatttgcctattctaatcggaacaggtttttgtacataataaagcttgttttcctctggctcttgtggccagtaacacttgcttgctttgtgcttgctgctgtctacagaattaattgggtgactggcgggattgcgattgcaatggcttgtattgtaggcttgatgtggcttagctacttcgttgcttccttcaggctgtttgctcgtacccgctcaatgtggtcattcaacccagaaacaaacattcttctcaatgtgcctctccgggggacaattgtgaccagaccgctcatggaaagtgaacttgtcattggtgctgtgatcattcgtggtcacttgcgaatggccggacactccctagggcgctgtgacattaaggacctgccaaaagagatcactgtggctacatcacgaacgctttcttattacaaattaggagcgtcgcagcgtgtaggcactgattcaggttttgctgcatacaaccgctaccgtattggaaactataaattaaatacagaccacgccggtagcaacgacaatattgctttgctagtacagtaagtgacaacagatgtttcatcttgttgacttccaggttacaatagcagagatattgattatcattatgaggactttcaggattgctatttggaatcttgacgttataataagttcaatagtgagacaattatttaagcctctaactaagaagaattattcggagttagatgatgaagaacctatggagttagattatccataaaacgaacatgaaaattattctcttcctgacattgattgtatttacatcttgcgagctatatcactatcaggagtgtgttagaggtacgactgtactactaaaagaaccttgcccatcaggaacatacgagggcaattcaccatttcaccctcttgctgacaataaatttgcactaacttgcactagcacacactttgcttttgcttgtgctgacggtactcgacatacctatcagctgcgtgcaagatcagtttcaccaaaacttttcatcagacaagaggaggttcaacaagagctctactcgccactttttctcattgttgctgctctagtatttttaatactttgcttcaccattaagagaaagacagaatgaatgagctcactttaattgacttctatttgtgctttttagcctttctgctattccttgttttaataatgcttattatattttggttttcactcgaaatccaggatctagaagaaccttgtaccaaagtctaaacgaacatgaaacttctcattgttttgacttgtatttctctatgcagttgcatacgcactgtagtacagcgctgtgcatctaataaacctcatgtgcttgaagatccttgtcctactggttaccaacctgaatggaatataaggtacaacactaggggtaatacttatagcactgcttggctttgtgctctaggaaaggttttaccttttcatagatggcacactatggttcaaacatgcacacctaatgttactatcaactgtcaagatccagctggtggtgcgcttatagctaggtgttggtaccttcatgaaggtcaccaaactgctgcatttagagacgtacttgttgttttaactaaacgaacaaattaaaatgtctgataatggaccccaatcaaaccaacgtagtgccccccgcattacatttggtggacccacagattcaactgacaataaccagaatggaggacgcaatggggcaaggccaaaacagcgccgaccccaaggtttacccaataatactgcgtcttggttcacagctctcactcagcatggcaaggaggaacttagattccctcgaggccagggcgttccaatcaacaccaatagtggtccagatgaccaaattggctactaccgaagagctacccgacgagttcgtggtggtgacggcaaaatgaaagagctcagccccagatggtacttctattacctaggaactggcccagaagcttcacttccctacggcgctaacaaagaaggcatcgtatgggttgcaactgagggagccttgaatacacccaaagaccacattggcacccgcaatcctaataacaatgctgccaccgtgctacaacttcctcaaggaacaacattgccaaaaggcttctacgcagagggaagcagaggcggcagtcaagcctcttctcgctcctcatcacgtagtcgcggtaattcaagaaattcaactcctggcagcagtaggggaaattctcctgctcgaatggctagcggaggtggtgaaactgccctcgcgctattgctgctagacagattgaaccagcttgagagcaaagtttctggtaaaggccaacaacaacaaggccaaactgtcactaagaaatctgctgctgaggcatctaaaaagcctcgccaaaaacgtactgccacaaaacagtacaacgtcactcaagcatttgggagacgtggtccagaacaaacccaaggaaatttcggggaccaagacctaatcagacaaggaactgattacaaacattggccgcaaattgcacaatttgctccaagtgcctctgcattctttggaatgtcacgcattggcatggaagtcacaccttcgggaacatggctgacttatcatggagccattaaattggatgacaaagatccacaattcaaagacaacgtcatactgctgaacaagcacattgacgcatacaaaacattcccaccaacagagcctaaaaaggacaaaaagaaaaagactgatgaagctcagcctttgccgcagagacaaaagaagcagcccactgtgactcttcttcctgcggctgacatggatgatttctccagacaacttcaaaattccatgagtggagcttctgctgattcaactcaggcataaacactcatgatgaccacacaaggcagatgggctatgtaaacgttttcgcaattccgtttacgatacatagtctactcttgtgcagaatgaattctcgtaactaaacagcacaagtaggtttagttaactttaatctcacatagcaatctttaatcaatgtgtaacattagggaggacttgaaagagccaccacattttcatcgaggccacgcggagtacgatcgagggtacagtgaataatgctagggagagctgcctatatggaagagccctaatgtgtaaaattaattttagtagtgctatccccatgtgattttaatagcttcttaggagaatcac

SEQ ID NO: 29797 - DNA, 29731 bp, SARS Coronavirus
ctacccaggaaaagccaaccaacctcgatctcttgtagatctgttctctaaacgaactttaaaatctgtgtagctgtcgctcggctgcatgcctagtgcacctacgcagtataaacaataataaattttactgtcgttgacaagaaacgagtaactcgtccctcttctgcagactgcttacggtttcgtccgtgttgcagtcgatcatcagcatacctaggtttcgtccgggtgtgaccgaaaggtaagatggagagccttgttcttggtgtcaacgagaaaacacacgtccaactcagtttgcctgtccttcaggttagagacgtgctagtgcgtggcttcggggactctgtggaagaggccctatcggaggcacgtgaacacctcaaaaatggcacttgtggtctagtagagctggaaaaaggcgtactgccccagcttgaacagccctatgtgttcattaaacgttctgatgccttaagcaccaatcacggccacaaggtcgttgagctggttgcagaaatggacggcattcagtacggtcgtagcggtataacactgggagtactcgtgccacatgtgggcgaaaccccaattgcataccgcaatgttcttcttcgtaagaacggtaataagggagccggtggtcatagctatggcaccgatctaaagtcttatgacttaggtgacgagcttggcactgatcccattgaagattatgaacaaaactggaacactaagcatggcagtggtgcactccgtgaactcactcgtgagctcaatggaggtgcagtcactcgctatgtcgacaacaatttctgtggcccagatgggtaccctcttgattgcatcaaagattttctcgcacgcgcgggcaagtcaatgtgcactctttccgaacaacttgattacatcgagtcgaagagaggtgtctactgctgccgtgaccatgagcatgaaattgcctggttcactgagcgctctgataagagctacgagcaccagacacccttcgaaattaagagtgccaagaaatttgacactttcaaaggggaatgcccaaagtttgtgtttcctcttaactcaaaagtcaaagtcattcaaccacgtgttgaaaagaaaaagactgagggtttcatggggcgtatacgctctgtgtaccctgttgcatctccacaggagtgtaacaacatgcacttgtctaccttgatgaaatgtaatcattgcgatgaagtttcatggcagacgtgcgactttctgaaagccacttgtgaacattgtggcactgaaaatttagttattgaaggacctactacatgtgggtacctacctactaatgctgtagtgaaaatgccatgtcctgcctgtcaagacccagagattggacctgagcatagtgttgcagattatcacaaccactcaaacattgaaactcgactccgcaagggaggtaggactagatgttttggaggctgtgtgtttgcctatgttggctgctataataagcgtgcctactgggttcctcgtgctagtgctgatattggctcaggccatactggcattactggtgacaatgtggagaccttgaatgaggatctccttgagatactgagtcgtgaacgtgttaacattaacattgttggcgattttcatttgaatgaagaggttgccatcattttggcatctttctctgcttctacaagtgcctttattgacactataaagagtcttgattacaagtctttcaaaaccattgttgagtcctgcggtaactataaagttaccaagggaaagcccgtaaaaggtgcttggaacattggacaacagagatcagttttaacaccactgtgtggttttccctcacaggctgctggtgttatcagatcaattttttcgcgcacacttgatgcagcaaaccactcaattcctgatttgcaaagagcagctgtcaccatacttgatggtatttctgaacagtcattacgtcttgtcgacgccatggtttatacttcagacctgctcaccaacagtgtcattattatggcatatgtaactggtggtcttgtacaacagacttctcagtggttgtctaatcttttgggcactactgttgaaaaactcaggcctatctttgaatggattgaggcgaaacttagtgcaggagttgaatttctcaaggatgcttgggagattctcaaatttctcattacaggtgtttttgacatcgtcaagggtcaaatacaggttgcttcagataacatcaaggattgtgtaaaatgcttcattgatgttgttaacaaggcactcgaaatgtgcattgatcaagtcactatcgctggcgcaaagttgcgatcactcaacttaggtgaagtcttcatcgctcaaagcaagggactttaccgtcagtgtatacgtggcaaggagcagctgcaactactcatgcctcttaaggcaccaaaagaagtaacctttcttgaaggtgattcacatgacacagtacttacctctgaggaggttgttctcaagaacggtgaactcgaagcactcgagacgcccgttgatagcttcacaaatggagctatcgttggcacaccagtctgtgtaaatggcctcatgctcttagagattaaggacaaagaacaatactgcgcattgtctcctggtttactggctacaaacaatgtctttcgcttaaaagggggtgcaccaattaaaggtgtaacctttggagaagatactgtttgggaagttcaaggttacaagaatgtgagaatcacatttgagcttgatgaacgtgttgacagagtgcttaatgaaaagtgctctgtctacactgttgaatccggtaccgaagttactgagtttgcatgtgttgtagcagaggctgttgtgaagactttacaaccagtttctgatctccttaccaacatgggtattgatcttgatgagtggagtgtagctacattctacttatttgatgatgctggtgaagaaaacttttcatcacgtatgtattgttccttttaccctccagatgaggaagaagaggacgatgcagagtgtgaggaagaagaaattgatgaaacctgtgaacatgagtacggtacagaggatgattatcaaggtctccctctggaatttggtgcctcagctgaaacagttcgagttgaggaagaagaagaggaagactggctggatgatactactgagcaatcagagattgagccagaaccagaacctacacctgaagaaccagttaatcagtttactggttatttaaaacttactgacaatgttgccattaaatgtgctgacatcgttaaggaggcacaaagtgctaatcctatggtgattgtaaatgctgctaacatacacctgaaacatggtggtggtgtagcaggtgcactcaacaaggcaaccaatggtgccatgcaaaaggagagtgatgattacattaagctaaatggccctcttacagtaggagggtcttgtttgctttctggacataatcttgctaagaagtgtctgcatgttgttggacctaacctaaatgcaggtgaggacatccagcttcttaaggcagcatatgaaaatttcaattcacaggacaccttacttgcaccattgttgtcagcaggcatatttggtgctaaactacttcagtctttacaagtgtgcgtgcagacggttcgtacacaggtttatattgcagtcaatgacaaagctctttatgagcaggttgtcatggattatcttgataacctgaagcctagagtggaagcacctaaacaagaggagccaccaaacacagaagattccaaaactgaggagaaatctgtcgtacagaagcctgtcgatgtgaagccaaaaattaaggcctgcattgatgaggttaccacaacactggaagaaactaagtttcttaccaataagttactcttgtttgctgatatcaatggtaagctttaccatgattctcagaacatgcttagaggtgaagatatgtctttccttgagaaggatgcaccttacatggtaggtgatgttatcactagtggtgatatcacttgtgttgtaataccctccaaaaaggctggtggcactactgagatgctctcaagagctttgaagaaagtgccagttgatgagtatataaccacgtaccctggacaaggatgtgctggttatacacttgaggaagctaagactgctcttaagaaatgcaaatctgcattttatgtactaccttcagaagcacctaatgctaaggaagagattctaggaactgtatcctggaatttgagagaaatgcttgctcatgctgaagagacaagaaaattaatgcctatatgcatggatgttagagccataatggcaaccatccaacgtaagtataaaggaattaaaattcaagagggcatcgttgactatggtgtccgattcttcttttatactagtaaagagcctgtagcttctattattacgaagctgaactctctaaatgagccgcttgtcacaatgccaattggttatgtgacacatggttttaatcttgaagaggctgcgcgctgtatgcgttctcttaaagctcctgccgtagtgtcagtatcatcaccagatgctgttactacatataatggatacctcacttcgtcatcaaagacatctgaggagcactttgtagaaacagtttctttggctggctcttacagagattggtcctattcaggacagcgtacagagttaggtgttgaatttcttaagcgtggtgacaaaattgtgtaccacactctggagagccccgtcgagtttcatcttgacggtgaggttctttcacttgacaaactaaagagtctcttatccctgcgggaggttaagactataaaagtgttcacaactgtggacaacactaatctccacacacagcttgtggatatgtctatgacatatggacagcagtttggtccaacatacttggatggtgctgatgttacaaaaattaaacctcatgtaaatcatgagggtaagactttctttgtactacctagtgatgacacactacgtagtgaagctttcgagtactaccatactcttgatgagagttttcttggtaggtacatgtctgctttaaaccacacaaagaaatggaaatttcctcaagttggtggtttaacttcaattaaatgggctgataacaattgttatttgtctagtgttttattagcacttcaacagattgaagtcaaattcaatgcaccagcacttcaagaggcttattatagagcccgtgctggtgatgctgctaacttttgtgcactcatactcgcttacagtaataaaactgttggcgagcttggtgatgtcagagaaactatgacccatcttctacagcatgctaatttggaatctgcaaagcgagttcttaatgtggtgtgtaaacattgtggtcagaaaactactaccttaacgggtgtagaagctgtgatgtatatgggtactctatcttatgataatcttaagacaggtgtttccattccatgtgtgtgtggtcgtgatgctacacaatatctagtacaacaagagtcttcttttgttatgatgtctgcaccacctgctgagtataaattacagcaaggtacattcttatgtgcgaatgagtacactggtaattatcagtgtggtcattacactcatataactgctaaggagaccctctatcgtattgacggagctcaccttacaaagatgtcagagtacaaaggaccagtgactgatgttttctacaaggaaacatcttacactacaaccatcaagcctgtgtcgtataaactcgatggagttacttacacagagattgaaccaaaattggatgggtattataaaaaggataatgcttactatacagagcagcctatagaccttgtaccaactcaaccattaccaaatgcgagttttgataatttcaaactcacatgttctaacacaaaatttgctgatgatttaaatcaaatgacaggcttcacaaagccagcttcacgagagctatctgtcacattcttcccagacttgaatggcgatgtagtggctattgactatagacactattcagcgagtttcaagaaaggtgctaaattactgcataagccaattgtttggcacattaaccaggctacaaccaagacaacgttcaaaccaaacacttggtgtttacgttgtctttggagtacaaagccagtagatacttcaaattcatttgaagttctggcagtagaagacacacaaggaatggacaatcttgcttgtgaaagtcaacaacccacctctgaagaagtagtggaaaatcctaccatacagaaggaagtcatagagtgtgacgtgaaaactaccgaagttgtaggcaatgtcatacttaaaccatcagatgaaggtgttaaagtaacgcaagagttaggtcatgaggatcttatggctgcttatgtggaaaacacaagcattaccattaagaaacctaatgagctttcactagccttaggtttaaaaacaattgccactcatggtattgctgcaattaatagtgttccttggagtaaaatttttgcttatgtcaaaccattcttaggacaagcagcaattacaacatcaaattgcgctaagagattagcacaacgtgtgtttaacaattatatgccttatgtgtttacattattgttccaattgtgtacttttactaaaagtaccaattctagaattagagcttcactacctacaactattgctaaaaatagtgttaagagtgttgctaaattatgtttggatgccggcattaattatgtgaagtcacccaaattttctaaattgttcacaatcgctatgtggctattgttgttaagtatttgcttaggttctctaatctatgtaactgctgcttttggtgtactcttatctaattttggtgctccttcttattgtaatggcgttagagaattgtatcttaattcgtctaacgttactactatggatttctgtgaaggttcttttccttgcagcatttgttcaagtggattagactcccttgattcttatccagctcttgaaaccattcaggtgacgatttcatcgtacaagctagacttgacaattttaggtctggccgctgagtgggttttggcatatatgttgttcacaaaattcttttatttattaggtctttcagctataatgcaggtgttctttggctattttgctagtcatttcatcagcaattcttggctcatgtggtttatcattagtattgtacaaatggcacccgtttctgcaatggttaggatgtacatcttctttgcttctttctactacatatggaagagctatgttcatatcatggatggttgcacctcttcgacttgcatgatgtgctataagcgcaatcgtgccacacgcgttgagtgtacaactattgttaatggcatgaagagatctttctatgtctatgcaaatggaggccgtggcttctgcaagactcacaattggaattgtctcaattgtgacacattttgcactggtagtacattcattagtgatgaagttgctcgtgatttgtcactccagtttaaaagaccaatcaaccctactgaccagtcatcgtatattgttgatagtgttgctgtgaaaaatggcgcgcttcacctctactttgacaaggctggtcaaaagacctatgagagacatccgctctcccattttgtcaatttagacaatttgagagctaacaacactaaaggttcactgcctattaatgtcatagtttttgatggcaagtccaaatgcgacgagtctgcttctaagtctgcttctgtgtactacagtcagctgatgtgccaacctattctgttgcttgaccaagctcttgtatcagacgttggagatagtactgaagtttccgttaagatgtttgatgcttatgtcgacaccttttcagcaacttttagtgttcctatggaaaaacttaaggcacttgttgctacagctcacagcgagttagcaaagggtgtagctttagatggtgtcctttctacattcgtgtcagctgcccgacaaggtgttgttgataccgatgttgacacaaaggatgttattgaatgtctcaaactttcacatcactctgacttagaagtgacaggtgacagttgtaacaatttcatgctcacctataataaggttgaaaacatgacgcccagagatcttggcgcatgtattgactgtaatgcaaggcatatcaatgcccaagtagcaaaaagtcacaatgtttcactcatctggaatgtaaaagactacatgtctttatctgaacagctgcgtaaacaaattcgtagtgctgccaagaagaacaacataccttttagactaacttgtgctacaactagacaggttgtcaatgtcataactactaaaatctcactcaagggtggtaagattgttagtacttggtttaaacttatgcttaaggccacattattgtgcgttcttgctgcattggtttgttacatcgttatgccagtacatacattgtcaatccatgatggttacacaaatgaaatcattggttacaaagccattcaggatggtgtcactcgtgacatcatttctactgatgattgttttgcaaataaacatgctggttttgacgcatggtttagccagcgtggtggttcatacaaaaatgacaaaagctgccctgtagtagctgctatcattacaagagagattggtttcatagtgcctggcttaccgggtactgtgctgagagcaatcaatggtgacttcttgcattttctacctcgtgtttttagtgctgttggcaacatttgctacacaccttccaaactcattgagtatagtgattttgctacctctgcttgcgttcttgctgctgagtgtacaatttttaaggatgctatgggcaaacctgtgccatattgttatgacactaatttgctagagggttctatttcttatagtgagcttcgtccagacactcgttatgtgcttatggatggttccatcatacagtttcctaacacttacctggagggttctgttagagtagtaacaacttttgatgctgagtactgtagacatggtacatgcgaaaggtcagaagcaggtatttgcctatctaccagtggtagatgggttcttaataatgagcattacagagctctatcaggagttttctgtggtgttgatgcgatgaatctcatagctaacatctttactcctcttgtgcaacctgtgggtgctttagatgtgtctgcttcagtagtggctggtggtattattgccatattggtgacttgtgctgcctactactttatgaaattcagacgtgcttttggtgagtacaaccatgttgttgctgctaatgcacttttgtttttgatgtctttcactatactctgtctggcaccagcttacagctttctgccgggagtctactcagtcttttacttgtacttgacattctatttcaccaatgatgtttcattcttggctcaccttcaatggtttgccatgttttctcctattgtgcctttttggataacagcaatctatgtattctgtatttctctgaagcactgccattggttctttaacaactatcttaggaaaagagtcatgtttaatggagttacatttagtaccttcgaggaggctgctttgtgtacctttttgctcaacaaggaaatgtacctaaaattgcgtagcgagacactgttgccacttacacagtataacaggtatcttgctctatataacaagtacaagtatttcagtggagccttagatactaccagctatcgtgaagcagcttgctgccacttagcaaaggctctaaatgactttagcaactcaggtgctgatgttctctaccaaccaccacagacatcaatcacttctgctgttctgcagagtggttttaggaaaatggcattcccgtcaggcaaagttgaagggtgcatggtacaagtaacctgtggaactacaactcttaatggattgtggttggatgacacagtatactgtccaagacatgtcatttgcacagcagaagacatgcttaatcctaactatgaagatctgctcattcgcaaatccaaccatagctttcttgttcaggctggcaatgttcaacttcgtgttattggccattctatgcaaaattgtctgcttaggcttaaagttgatacttctaaccctaagacacccaagtataaatttgtccgtatccaacctggtcaaacattttcagttctagcatgctacaatggttcaccatctggtgtttatcagtgtgccatgagacctaatcataccattaaaggttctttccttaatggatcatgtggtagtgttggttttaacattgattatgattgcgtgtctttctgctatatgcatcatatggagcttccaacaggagtacacgctggtactgacttagaaggtaaattctatggtccatttgttgacagacaaactgcacaggctgcaggtacagacacaaccataacattaaatgttttggcatggctgtatgctgctgttatcaatggtgataggtggtttcttaatagattcaccactactttgaatgactttaaccttgtggcaatgaagtacaactatgaacctttgacacaagatcatgttgacatattgggacctctttctgctcaaacaggaattgccgtcttagatatgtgtgctgctttgaaagagctgctgcagaatggtatgaatggtcgtactatccttggtagcactattttagaagatgagtttacaccatttgatgttgttagacaatgctctggtgttaccttccaaggtaagttcaagaaaattgttaagggcactcatcattggatgcttttaactttcttgacatcactattgattcttgttcaaagtacacagtggtcactgtttttctttgtttacgagaatgctttcttgccatttactcttggtattatggcaattgctgcatgtgctatgctgcttgttaagcataagcacgcattcttgtgcttgtttctgttaccttctcttgcaacagttgcttactttaatatggtctacatgcctgctagctgggtgatgcgtatcatgacatggcttgaattggctgacactagcttgtctggttataggcttaaggattgtgttatgtatgcttcagctttagttttgcttattctcatgacagctcgcactgtttatgatgatgctgctagacgtgtttggacactgatgaatgtcattacacttgtttacaaagtctactatggtaatgctttagatcaagctatttccatgtgggccttagttatttctgtaacctctaactattctggtgtcgttacgactatcatgtttttagctagagctatagtgtttgtgtgtgttgagtattacccattgttatttattactggcaacaccttacagtgtatcatgcttgtttattgtttcttaggctattgttgctgctgctactttggccttttctgtttactcaaccgttacttcaggcttactcttggtgtttatgactacttggtctctacacaagaatttaggtatatgaactcccaggggcttttgcctcctaagagtagtattgatgctttcaagcttaacattaagttgttgggtattggaggtaaaccatgtatcaaggttgctactgtacagtctaaaatgtctgacgtaaagtgcacatctgtggtactgctctcggttcttcaacaacttagagtagagtcatcttctaaattgtgggcacaatgtgtacaactccacaatgatattcttcttgcaaaagacacaactgaagctttcgagaagatggtttctcttttgtctgttttgctatccatgcagggtgctgtagacattaataggttgtgcgaggaaatgctcgataaccgtgctactcttcaggctattgcttcagaatttagttctttaccatcatatgccgcttatgccactgcccaggaggcctatgagcaggctgtagctaatggtgattctgaagtcgttctcaaaaagttaaagaaatctttgaatgtggctaaatctgagtttgaccgtgatgctgccatgcaacgcaagttggaaaagatggcagatcaggctatgacccaaatgtacaaacaggcaagatctgaggacaagagggcaaaagtaactagtgctatgcaaacaatgctcttcactatgcttaggaagcttgataatgatgcacttaacaacattatcaacaatgcgcgtgatggttgtgttccactcaacatcataccattgactacagcagccaaactcatggttgttgtccctgattatggtacctacaagaacacttgtgatggtaacacctttacatatgcatctgcactctgggaaatccagcaagttgttgatgcggatagcaagattgttcaacttagtgaaattaacatggacaattcaccaaatttggcttggcctcttattgttacagctctaagagccaactcagctgttaaactacagaataatgaactgagtccagtagcactacgacagatgtcctgtgcggctggtaccacacaaacagcttgtactgatgacaatgcacttgcctactataacaattcgaagggaggtaggtttgtgctggcattactatcagaccaccaagatctcaaatgggctagattccctaagagtgatggtacaggtacaatttacacagaactggaaccaccttgtaggtttgttacagacacaccaaaagggcctaaagtgaaatacttgtacttcatcaaaggcttaaacaacctaaatagaggtatggtgctgggcagtttagctgctacagtacgtcttcaggctggaaatgctacagaagtacctgccaattcaactgtgctttccttctgtgcttttgcagtagaccctgctaaagcatataaggattacctagcaagtggaggacaaccaatcaccaactgtgtgaagatgttgtgtacacacactggtacaggacaggcaattactgtaacaccagaagctaacatggaccaagagtcctttggtggtgcttcatgttgtctgtattgtagatgccacattgaccatccaaatcctaaaggattctgtgacttgaaaggtaagtacgtccaaatacctaccacttgtgctaatgacccagtgggttttacacttagaaacacagtctgtaccgtctgcggaatgtggaaaggttatggctgtagttgtgaccaactccgcgaacccttgatgcagtctgcggatgcatcaacgtttttaaacgggtttgcggtgtaagtgcagcccgtcttacaccgtgcggcacaggcactagtactgatgtcgtctacagggcttttgatatttacaacgaaaaagttgctggttttgcaaagttcctaaaaactaattgctgtcgcttccaggagaaggatgaggaaggcaatttattagactcttactttgtagttaagaggcatactatgtctaactaccaacatgaagagactatttataacttggttaaagattgtccagcggttgctgtccatgactttttcaagtttagagtagatggtgacatggtaccacatatatcacgtcagcgtctaactaaatacacaatggctgatttagtctatgctctacgtcattttgatgagggtaattgtgatacattaaaagaaatactcgtcacatacaattgctgtgatgatgattatttcaataagaaggattggtatgatttcgtagagaatcctgacatcttacgcgtatatgctaacttaggtgagcgtgtacgccaatcattattaaagactgtacaattctgcgatgctatgcgtgatgcaggcattgtaggcgtactgacattagataatcaggatcttaatgggaactggtacgatttcggtgatttcgtacaagtagcaccaggctgcggagttcctattgtggattcatattactcattgctgatgcccatcctcactttgactagggcattggctgctgagtcccatatggatgctgatctcgcaaaaccacttattaagtgggatttgctgaaatatgattttacggaagagagactttgtctcttcgaccgttattttaaatattgggaccagacataccatcccaattgtattaactgtttggatgataggtgtatccttcattgtgcaaactttaatgtgttattttctactgtgtttccacctacaagttttggaccactagtaagaaaaatatttgtagatggtgttccttttgttgtttcaactggataccattttcgtgagttaggagtcgtacataatcaggatgtaaacttacatagctcgcgtctcagtttcaaggaacttttagtgtatgctgctgatccagctatgcatgcagcttctggcaatttattgctagataaacgcactacatgcttttcagtagctgcactaacaaacaatgttgcttttcaaactgtcaaacccggtaattttaataaagacttttatgactttgctgtgtctaaaggtttctttaaggaaggaagttctgttgaactaaaacacttcttctttgctcaggatggcaacgctgctatcagtgattatgactattatcgttataatctgccaacaatgtgtgatatcagacaactcctattcgtagttgaagttgttgataaatactttgattgttacgatggtggctgtattaatgccaaccaagtaatcgttaacaatctggataaatcagctggtttcccatttaataaatggggtaaggctagactttattatgactcaatgagttatgaggatcaagatgcacttttcgcgtatactaagcgtaatgtcatccctactataactcaaatgaatcttaagtatgccattagtgcaaagaatagagctcgcaccgtagctggtgtctctatctgtagtactatgacaaatagacagtttcatcagaaattattgaagtcaatagccgccactagaggagctactgtggtaattggaacaagcaagttttacggtggctggcataatatgttaaaaactgtttacagtgatgtagaaactccacaccttatgggttgggattatccaaaatgtgacagagccatgcctaacatgcttaggataatggcctctcttgttcttgctcgcaaacataacacttgctgtaacttatcacaccgtttctacaggttagctaacgagtgtgcgcaagtattaagtgagatggtcatgtgtggcggctcactatatgttaaaccaggtggaacatcatccggtgatgctacaactgcttatgctaatagtgtctttaacatttgtcaagctgttacagccaatgtaaatgcacttctttcaactgatggtaataagatagctgacaagtatgtccgcaatctacaacacaggctctatgagtgtctctatagaaatagggatgttgatcatgaattcgtggatgagttttacgcttacctgcgtaaacatttctccatgatgattctttctgatgatgccgttgtgtgctataacagtaactatgcggctcaaggtttagtagctagcattaagaactttaaggcagttctttattatcaaaataatgtgttcatgtctgaggcaaaatgttggactgagactgaccttactaaaggacctcacgaattttgctcacagcatacaatgctagttaaacaaggagatgattacgtgtacctgccttacccagatccatcaagaatattaggcgcaggctgttttgtcgatgatattgtcaaaacagatggtacacttatgattgaaaggttcgtgtcactggctattgatgcttacccacttacaaaacatcctaatcaggagtatgctgatgtctttcacttgtatttacaatacattagaaagttacatgatgagcttactggccacatgttggacatgtattccgtaatgctaactaatgataacacctcacggtactgggaacctgagttttatgaggctatgtacacaccacatacagtcttgcaggctgtaggtgcttgtgtattgtgcaattcacagacttcacttcgttgcggtgcctgtattaggagaccattcctatgttgcaagtgctgctatgaccatgtcatttcaacatcacacaaattagtgttgtctgttaatccctatgtttgcaatgccccaggttgtgatgtcactgatgtgacacaactgtatctaggaggtatgagctattattgcaagtcacataagcctcccattagttttccattatgtgctaatggtcaggtttttggtttatacaaaaacacatgtgtaggcagtgacaatgtcactgacttcaacgcgatagcaacatgtgattggactaatgctggcgattacatacttgccaacacttgtactgagagactcaagcttttcgcagcagaaacgctcaaagccactgaggaaacatttaagctgtcatatggtattgccactgtacgcgaagtactctctgacagagaattgcatctttcatgggaggttggaaaacctagaccaccattgaacagaaactatgtctttactggttaccgtgtaactaaaaatagtaaagtacagattggagagtacacctttgaaaaaggtgactatggtgatgctgttgtgtacagaggtactacgacatacaagttgaatgttggtgattactttgtgttgacatctcacactgtaatgccacttagtgcacctactctagtgccacaagagcactatgtgagaattactggcttgtacccaacactcaacatctcagatgagttttctagcaatgttgcaaattatcaaaaggtcggcatgcaaaagtactctacactccaaggaccacctggtactggtaagagtcattttgccatcggacttgctctctattacccatctgctcgcatagtgtatacggcatgctctcatgcagctgttgatgccctatgtgaaaaggcattaaaatatttgcccatagataaatgtagtagaatcatacctgcgcgtgcgcgcgtagagtgttttgataaattcaaagtgaattcaacactagaacagtatgttttctgcactgtaaatgcattgccagaaacaactgctgacattgtagtctttgatgaaatctctatggctactaattatgacttgagtgttgtcaatgctagacttcgtgcaaaacactacgtctatattggcgatcctgctcaattaccagccccccgcacattgctgactaaaggcacactagaaccagaatattttaattcagtgtgcagacttatgaaaacaataggtccagacatgttccttggaacttgtcgccgttgtcctgctgaaattgttgacactgtgagtgctttagtttatgacaataagctaaaagcacacaaggagaagtcagctcaatgcttcaaaatgttctacaaaggtgttattacacatgatgtttcatctgcaatcaacagacctcaaataggcgttgtaagagaatttcttacacgcaatcctgcttggagaaaagctgtttttatctcaccttataattcacagaacgctgtagcttcaaaaatcttaggattgcctacgcagactgttgattcatcacagggttctgaatatgactatgtcatattcacacaaactactgaaacagcacactcttgtaatgtcaaccgcttcaatgtggctatcacaagggcaaaaattggcattttgtgcataatgtctgatagagatctttatgacaaactgcaatttacaagtctagaaataccacgtcgcaatgtggctacattacaagcagaaaatgtaactggactttttaaggactgtagtaagatcattactggtcttcatcctacacaggcacctacacacctcagcgttgatataaagttcaagactgaaggattatgtgttgacataccaggcataccaaaggacatgacctaccgtagactcatctctatgatgggtttcaaaatgaattaccaagtcaatggttaccctaatatgtttatcacccgtgaagaagctattcgtcacgttcgtgcgtggattggctttgatgtagagggctgtcatgcaactagagatgctgtgggtactaacctacctctccagctaggattttctacaggtgttaacttagtagctgtaccgactggttatgttgacactgaaaataacacagaattcaccagagttaatgcaaaacctccaccaggtgaccagtttaaacatcttataccactcatgtataaaggcttgccctggaatgtagtgcgtattaagatagtacaaatgctcagtgatacactgaaaggattgtcagacagagtcgtgttcgtcctttgggcgcatggctttgagcttacatcaatgaagtactttgtcaagattggacctgaaagaacgtgttgtctgtgtgacaaacgtgcaacttgcttttctacttcatcagatacttatgcctgctggaatcattctgtgggttttgactatgtctataacccatttatgattgatgttcagcagtggggctttacgggtaaccttcagagtaaccatgaccaacattgccaggtacatggaaatgcacatgtggctagttgtgatgctatcatgactagatgtttagcagtccatgagtgctttgttaagcgcgttgattggtctgttgaataccctattataggagatgaactgagggttaattctgcttgcagaaaagtacaacacatggttgtgaagtctgcattgcttgctgataagtttccagttcttcatgacattggaaatccaaaggctatcaagtgtgtgcctcaggctgaagtagaatggaagttctacgatgctcagccatgtagtgacaaagcttacaaaatagaggaactcttctattcttatgctacacatcacgataaattcactgatggtgtttgtttgttttggaattgtaacgttgatcgttacccagccaatgcaattgtgtgtaggtttgacacaagagtcttgtcaaacttgaacttaccaggctgtgatggtggtagtttgtatgtgaataagcatgcattccacactccagctttcgataaaagtgcatttactaatttaaagcaattgcctttcttttactattctgatagtccttgtgagtctcatggcaaacaagtagtgtcggatattgattatgttccactcaaatctgctacgtgtattacacgatgcaatttaggtggtgctgtttgcagacaccatgcaaatgagtaccgacagtacttggatgcatataatatgatgatttctgctggatttagcctatggatttacaaacaatttgatacttataacctgtggaatacatttaccaggttacagagtttagaaaatgtggcttataatgttgttaataaaggacactttgatggacacgccggcgaagcacctgtttccatcattaataatgctgtttacacaaaggtagatggtattgatgtggagatctttgaaaataagacaacacttcctgttaatgttgcatttgagctttgggctaagcgtaacattaaaccagtgccagagattaagatactcaataatttgggtgttgatatcgctgctaatactgtaatctgggactacaaaagagaagccccagcacatgtatctacaataggtgtctgcacaatgactgacattgccaagaaacctactgagagtgcttgttcttcacttactgtcttgtttgatggtagagtggaaggacaggtagacctttttagaaacgcccgtaatggtgttttaataacagaaggttcagtcaaaggtctaacaccttcaaagggaccagcacaagctagcgtcaatggagtcacattaattggagaatcagtaaaaacacagtttaactactttaagaaagtagacggcattattcaacagttgcctgaaacctactttactcagagcagagacttagaggattttaagcccagatcacaaatggaaactgactttctcgagctcgctatggatgaattcatacagcgatataagctcgagggctatgccttcgaacacatcgtttatggagatttcagtcatggacaacttggcggtcttcatttaatgataggcttagccaagcgctcacaagattcaccacttaaattagaggattttatccctatggacagcacagtgaaaaattacttcataacagatgcgcaaacaggttcatcaaaatgtgtgtgttctgtgattgatcttttacttgatgactttgtcgagataataaagtcacaagatttgtcagtgatttcaaaagtggtcaaggttacaattgactatgctgaaatttcattcatgctttggtgtaaggatggacatgttgaaaccttctacccaaaactacaagcaagtcaagcgtggcaaccaggtgttgcgatgcctaacttgtacaagatgcaaagaatgcttcttgaaaagtgtgaccttcagaattatggtgaaaatgctgttataccaaaaggaataatgatgaatgtcgcaaagtatactcaactgtgtcaatacttaaatacacttactttagctgtaccctacaacatgagagttattcactttggtgctggctctgataaaggagttgcaccaggtacagctgtactcagacaatggttgccaactggcacactacttgtcgattcagatcttaatgacttcgtctccgacgcagattctactttaattggagactgtgcaacagtacatacggctaataaatgggaccttattattagcgatatgtatgaccctaagaccaaacatgtgacaaaagagaatgactctaaagaagggtttttcacttatctgtgtggatttataaagcaaaaactagccctgggtggttctatagctgtaaagataacagagcattcttggaatgctgacctttacaagcttatgggccatttctcatggtggacagcttttgttacaaatgtaaatgcatcatcatcggaagcatttttaattggggctaactatcttggcaagccgaaggaacaaattgatggctataccatgcatgctaactacattttctggaggaacacaaatcctatccagttgtcttcctattcactctttgacatgagcaaatttcctcttaaattaagaggaactgctgtaatgtctcttaaggagaatcaaatcaatgatatgatttattctcttctggaaaaaggtaggcttatcattagagaaaacaacagagttgtggtttcaagtgatattcttgttaacaactaaacgaacatgtttattttcttattatttcttactctcactagtggtagtgaccttgaccggtgcaccacttttgatgatgttcaagctcctaattacactcaacatacttcatctatgaggggggtttactatcctgatgaaatttttagatcagacactctttatttaactcaggatttatttcttccattttattctaatgttacagggtttcatactattaatcatacgtttgacaaccctgtcataccttttaaggatggtatttattttgctgccacagagaaatcaaatgttgtccgtggttgggtttttggttctaccatgaacaacaagtcacagtcggtgattattattaacaattctactaatgttgttatacgagcatgtaactttgaattgtgtgacaaccctttctttgctgtttctaaacccatgggtacacagacacatactatgatattcgataatgcatttaattgcactttcgagtacatatctgatgccttttcgcttgatgtttcagaaaagtcaggtaattttaaacacttacgagagtttgtgtttaaaaataaagatgggtttctctatgtttataagggctatcaacctatagatgtagttcgtgatctaccttctggttttaacactttgaaacctatttttaagttgcctcttggtattaaaattacaaattttagagccattcttacagcctttttacctgctcaagatacttggggcacgtcagctgcagcctattttgttggctatttaaagccaactaaatttatgctcaagtatgatgaaaatggtacaatcacagatgctgttgattgttctcaaaatccacttgctgaactcaaatgctctgttaagagctttgagattgacaaaggaatttaccagacctctaatttcagggttgttccctcaggagatgttgtgagattccctaatattacaaacttgtgtccttttggagaggtttttaatgctactaaattcccttctgtctatgcatgggagaggaaaagaatttctaattgtgttgctgattactctgtgctctacaactcaacatctttttcaacctttaagtgctatggcgtttctgccactaagttgaatgatctttgcttctccaatgtctatgcagattcttttgtagtcaagggagatgatgtaagacaaatagcgccaggacaaactggtgttattgctgattataattataaattgccagatgatttcatgggttgtgtccttgcttggaatactaggaacattgatgctacttcaactggtaattataattataaatataggtatcttagacatggcaagcttaggccctttgagagagacatatctaatgtgcctttctcccctgatggcaaaccttgcaccccacctgctcttaattgttattggccattaaaagattatggtttttacaccactagtggcattggctaccaaccttacagagttgtagtactttcttttgaacttttaaatgcaccggccacggtttgtggaccaaaattatccactgaccttattaagaaccagtgtgtcaattttaattttaatggactcactggtactggtgtgttaactccttcttcaaagagatttcaaccatttcaacaatttggccgtgatgtttctgatatcactgattccgttcgagatcctaaaacatctgaaatattagacatttcaccttgctcttttgggggtgtaagtgtaattacacctggaacaaatgcttcatctgaagttgctgttctatatcaagatgttaactgcactgatgttcctacagcaattcatgcagatcaactcacaccagcttggcgcatatattctactggaaacaatgtattccagactcaagcaggctgtcttataggagctgagcatgtcgacacttcttatgagtgcgacattcctattggagctggcatttgtgctagttaccatacagtttcttcattacgtagtactagccaaaaatctattgtggcttatactatgtctttaggtgctgatagttcaattgcttactctaataacaccattgctatacctactaactttttaattagcattactacagaagtaatgcctgtttctatggctaaaacctccgtagattgtaatatgtacatctgcggagattctactgaatgtgctaatttgcttctccaatatggtagcttttgcgcacaactaaatcgtgcactctcaggtattgctgttgaacaggatcgcaacacacgtgaagtgttcgctcaagtcaaacaaatgtacaaaaccccaactttgaaagattttggtggttttaatttttcacaaatattacctgaccctctaaagccaactaagaggtcttttattgaggacttgctctttaataaggtgacactcgctgatgctggcttcatgaagcaatatggcgaatgcctaggtgatattaatgctagagatctcatttgtgcgcagaagttcaatggacttacagtgttgccacctctgctcactgatgatatgattgctgcctacactgctgctctagttagtggtactgccactgctggatggacatttggtgctggcgctgctcttcaaataccttttgctatgcaaatggcatataggttcaatggcattggagttgcccaaaatgttctctatgagaaccaaaaacaaatcgccaaccaatttaacaaggcgattagtcaaattcaagaatcacttacaacaacatcaactgcattgggcaagctgcaagacgttgttaaccagaatgctcaagcattaaacacacttgttaaacaacttagctctaattttggtgcaatttcaagtgtgctaaatgatatcctttctcgacttgataaagtcgaggcggaggtacaaattgacaggttaattacaggcagacttcaaagccttcaaacctatgtaacacaacaactaatcagggctgctgaaatcagggcttctgctaatcttgctgctactaaaatgtctgagtgtgttcttggacaatcaaaaagagttgacttttgcggaaagggctaccaccttatgtccttcccacaagcagccccgcatggtgttgtcttcctacatgtcacgtatgtgccatcccaggagaggaacttcaccacagcgccagcaatttgtcatgaaggcaaagcatacttccctcgtgaaggtgtttttgtgtttaatggcacttcttggtttattacacagaggaacttcttttctccacaaataattactacagacaatacatttgtctcaggaaattgtgatgtcgttattggcatcattaacaacacagtttatgatcctctgcaacctgagcttgactcattcaaagaagagctggacaagtacttcaaaaatcatacatcaccagatgttgatcttggcgacatttcaggcattaacgcttctgtcgtcaacattcaagaagaaattgaccgcctcaatgaggtcgctaaaaatttaaatgaatcactcattgaccttcaagaattgggaaaatatgagcaatatattaaatggccttggtatgtttggctcggcttcattgctggactaattgccatcgtcatggttacaatcttgctttgttgcatgactagttgttgcagttgcctcaagggtgcatgctcttgtggttcttgctgcaagtttgatgaggatgactctgagccagttctcaagggtgtcaaattacattacacataaacgaacttatggatttgtttatgagaatttttactcttggatcaattactgcacagccagtaaaaattgacaatgcttctcctgcaagtactgttcatgctacagcaacgataccgctacaagcctcactccctttcggatggcttgttattggcgttgcatttcttgctgtttttcagagcgctaccaaaataattgcgctcaataaaagatggcagctagccctttataagggcttccagttcattagcaatttactgctgctatttgttaccatctattcatatcttttgcttgtcgctgcaggtatggaggcgcaatttttgtacctctatgccttgatatattttctacaatgcatcaacgcaggtagaattattatgagatgttggctttgttggaagtgcaaatccaagaacccattactttatgatgccaactactttgtttgctggcacacacataactatgactactgtataccatataacagtgtcacagatacaattgtcgttactgaaggtgacggcatttcaacaccaaaactcaaagaagactaccaaattggtggttattctgaggataggcactcaggtgttaaagactatgtcgttgtacatggctatttcaccgaagtttactaccagcttgagtctacacaaattactacagacactggtattgaaaatgctacattcttcatctttaacaagcttgttaaagacccaccgaatgtgcaaatacacacaatcgacggctcttcaggagttgctaatccagcaatggatccaatttatgatgagccgacgacgactactagcgtgcctttgtaagcacaagaaagtgagtacgaacttatgtactcattcgtttcggaagaaacaggtacgttaatagttaatagcgtacttctttttcttgctttcgtggtattcttgctagtcacactagccatccttactgcgcttcgattgtgtgcgtactgctgcaatattgttaacgtgagtttagtaaaaccaacggtttacgtctactcgcgtgttaaaaatctgaactcttctgaaggagttcctgatcttctggtctaaacgaactaactattattattattctgtttggaactttaacattgcttatcatggcagacaacagtactattaccgttgaggagcttaaacaactcctggaacaatggaacctagtaataggtttcctattcctagcctggattatgttactacaatttgcctattctaatcggaataggtttttgtacataataaagcttgttttcctctggctcttgtggccagtaacacttgcttgctttgtgcttgctgctgtctacagaattaattgggtgactggcgggattgcgattgcaatggcttgtattgtaggcttgatgtggcttagctacttcgttgcttccttcaggctgtttgctcgtacccgctcaatgtggtcattcaacccagaaacaaacattcttctcaatgtgcctctccgggggacaattgtgaccagaccgctcatggaaagtgaacttgtcattggtgctgtgatcattcgtggtcacttgcgaatggccggacactccctagggcgctgtgacattaaggacctgccaaaagagatcactgtggctacatcacgaacgctttcttattacaaattaggagcgtcgcagcgtgtaggcactgattcaggttttgctgcatacaaccgctaccgtattggaaactataaattaaatacagaccacgccggtagcaacgacaatattgctttgctagtacagtaagtgacaacagatgtttcatcttgttgacttccaggttacaatagcagagatattgattatcattatgaggactttcaggattgctatttggaatcttgacgttataataagttcaatagtgagacaattatttaagcctctaactaagaagaattattcggagttagatgatgaagaacctatggagttagattatccataaaacgaacatgaaaattattctcttcctgacattgattgtatttacatcttgcgagctatatcactatcaggagtgtgttagaggtacgactgtactactaaaagaaccttgcccatcaggaacatacgagggcaattcaccatttcaccctcttgctgacaataaatttgcactaacttgcactagcacacactttgcttttgcttgtgctgacggtactcgacatacctatcagctgcgtgcaagatcagtttcaccaaaacttttcatcagacaagaggaggttcaacaagagctctactcgccactttttctcattgttgctgctctagtatttttaatactttgcttcaccattaagagaaagacagaatgaatgagctcactttaattgacttctatttgtgctttttagcctttctgctattccttgttttaataatgcttattatattttggttttcactcgaaatccaggatctagaagaaccttgtaccaaagtctaaacgaacatgaaacttctcattgttttgacttgtatttctctatgcagttgcatacgcactgtagtacagcgctgtgcatctaataaacctcatgtgcttgaagatccttgtcctactggttaccaacctgaatggaatataaggtacaacactaggggtaatacttatagcactgcttggctttgtgctctaggaaaggttttaccttttcatagatggcacactatggttcaaacatgcacacctaatgttactatcaactgtcaagatccagctggtggtgcgcttatggctaggtgttggtaccttcatgaaggtcaccaaactgctgcatttagagacgtacttgttgttttaaataaacgaacaaattaaaatgtctgataatggaccccaatcaaaccaacgtagtgccccccgcattacatttggtggacccacagattcaactgacaataaccagaatggaggacgcaatggggcaaggccaaaacagcgccgaccccaaggtttacccaataatactgcgtcttggttcacagctctcactcagcatggcaaggaggaacttagattccctcgaggccagggcgttccaatcaacaccaatagtggtccagatgaccaaattggctactaccgaagagctacccgacgagttcgtggtggtgacggcaaaatgaaagagctcagccccagatggtacttctattacctaggaactggcccagaagcttcacttccctacggcgctaacaaagaaggcatcgtatgggttgcaactgagggagccttgaatacacccaaagaccacattggcacccgcaatcctaataacaatgctgccaccgtgctacaacttcctcaaggaacaacattgccaaaaggcttctacgcagagggaagcagaggcggcagtcaagcctcttctcgctcctcatcacgtagtcgcggtaattcaagaaattcaactcctggcagcagtaggggaaattctcctgctcgaatggctagcggaggtggtgaaactgccctcgcgctattgctgctagacagattgaaccagcttgagagcaaagtttctggtaaaggccaacaacaacaaggccaaactgtcactaagaaatctgctgctgaggcatctaaaaagcctcgccaaaaacgtactgccacaaaacagtacaacgtcactcaagcatttgggagacgtggtccagaacaaacccaaggaaatttcggggaccaagacctaatcagacaaggaactgattacaaacattggccgcaaattgcacaatttgctccaagtgcctctgcattctttggaatgtcacgcattggcatggaagtcacaccttcgggaacatggctgacttatcatggagccattaaattggatgacaaagatccacaattcaaagacaacgtcatactgctgaacaagcacattgacgcatacaaaacattcccaccaacagagcctaaaaaggacaaaaagaaaaagactgatgaagctcagcctttgccgcagagacaaaagaagcagcccactgtgactcttcttcctgcggctgacatggatgatttctccagacaacttcaaaattccatgagtggagcttctgctgattcaactcaggcataaacactcatgatgaccacacaaggcagatgggctatgtaaacgttttcgcaattccgtttacgatacatagtctactcttgtgcagaatgaattctcgtaactaaacagcacaagtaggtttagttaactttaatctcacatagcaatctttaatcaatgtgtaacattagggaggacttgaaagagccaccacattttcatcgaggccacgcggagtacgatcgagggtacagtgaataatgctagggagagctgcctatatggaagagccctaatgtgtaaaattaattttagtagtgctatccccatgtgattttaatagcttctta

SEQ ID NO: 29798 - DNA, 29720 bp, SARS Coronavirus
ctacccaggaaaagccaaccaacctcgatctcttgtagatctgttctctaaacgaactttaaaatctgtgtagctgtcgctcggctgcatgcctagtgcacctacgcagtataaacaataataaattttactgtcgttgacaagaaacgagtaactcgtccctcttctgcagactgcttacggtttcgtccgtgttgcagtcgatcatcagcatacctaggtttcgtccgggtgtgaccgaaaggtaagatggagagccttgttcttggtgtcaacgagaaaacacacgtccaactcagtttgcctgtccttcaggttagagacgtgctagtgcgtggcttcggggactctgtggaagaggccctatcggaggcacgtgaacacctcaaaaatggcacttgtggtctagtagagctggaaaaaggcgtactgccccagcttgaacagccctatgtgttcattaaacgttctgatgccttaagcaccaatcacggccacaaggtcgttgagctggttgcagaaatggacggcattcagtacggtcgtagcggtataacactgggagtactcgtgccacatgtgggcgaaaccccaattgcataccgcaatgttcttcttcgtaagaacggtaataagggagccggtggtcatagctatggcatcgatctaaagtcttatgacttaggtgacgagcttggcactgatcccattgaagattatgaacaaaactggaacactaagcatggcagtggtgcactccgtgaactcactcgtgagctcaatggaggtgcagtcactcgctatgtcgacaacaatttctgtggcccagatgggtaccctcttgattgcatcaaagattttctcgcacgcgcgggcaagtcaatgtgcactctttccgaacaacttgattacatcgagtcgaagagaggtgtctactgctgccgtgaccatgagcatgaaattgcctggttcactgagcgctctgataagagctacgagcaccagacacccttcgaaattaagagtgccaagaaatttgacactttcaaaggggaatgcccaaagtttgtgtttcctcttaactcaaaagtcaaagtcattcaaccacgtgttgaaaagaaaaagactgagggtttcatggggcgtatacgctctgtgtaccctgttgcatctccacaggagtgtaacaatatgcacttgtctaccttgatgaaatgtaatcattgcgatgaagtttcatggcagacgtgcgactttctgaaagccacttgtgaacattgtggcactgaaaatttagttattgaaggacctactacatgtgggtacctacctactaatgctgtagtgaaaatgccatgtcctgcctgtcaagacccagagattggacctgagcatagtgttgcagattatcacaaccactcaaacattgaaactcgactccgcaagggaggtaggactagatgttttggaggctgtgtgtttgcctatgttggctgctataataagcgtgcctactgggttcctcgtgctagtgctgatattggctcaggccatactggcattactggtgacaatgtggagaccttgaatgaggatctccttgagatactgagtcgtgaacgtgttaacattaacattgttggcgattttcatttgaatgaagaggttgccatcattttggcatctttctctgcttctacaagtgcctttattgacactataaagagtcttgattacaagtctttcaaaaccattgttgagtcctgcggtaactataaagttaccaagggaaagcccgtaaaaggtgcttggaacattggacaacagagatcagttttaacaccactgtgtggttttccctcacaggctgctggtgttatcagatcaatttttgcgcgcacacttgatgcagcaaaccactcaattcctgatttgcaaagagcagctgtcaccatacttgatggtatttctgaacagtcattacgtcttgtcgacgccatggtttatacttcagacctgctcaccaacagtgtcattattatggcatatgtaactggtggtcttgtacaacagacttctcagtggttgtctaatcttttgggcactactgttgaaaaactcaggcctatctttgaatggattgaggcgaaacttagtgcaggagttgaatttctcaaggatgcttgggagattctcaaatttctcattacaggtgtttttgacatcgtcaagggtcaaatacaggttgcttcagataacatcaaggattgtgtaaaatgcttcattgatgttgttaacaaggcactcgaaatgtgcattgatcaagtcactatcgctggcgcaaagttgcgatcactcaacttaggtgaagtcttcatcgctcaaagcaagggactttaccgtcagtgtatacgtggcaaggagcagctgcaactactcatgcctcttaaggcaccaaaagaagtaacctttcttgaaggtgattcacatgacacagtacttacctctgaggaggttgttctcaagaacggtgaactcgaagcactcgagacgcccgttgatagcttcacaaatggagctatcgttggcacaccagtctgtgtaaatggcctcatgctcttagagattaaggacaaagaacaatactgcgcattgtctcctggtttactggctacaaacaatgtctttcgcttaaaagggggtgcaccaattaaaggtgtaacctttggagaagatactgtttgggaagttcaaggttacaagaatgtgagaatcacatttgagcttgatgaacgtgttgacaaagtgcttaatgaaaagtgctctgtctacactgttgaatccggtaccgaagttactgagtttgcatgtgttgtagcagaggctgttgtgaagactttacaaccagtttctgatctccttaccaacatgggtattgatcttgatgagtggagtgtagctacattctacttatttgatgatgctggtgaagaaaacttttcatcacgtatgtattgttccttttaccctccagatgaggaagaagaggacgatgcagagtgtgaggaagaagaaattgatgaaacctgtgaacatgagtacggtacagaggatgattatcaaggtctccctctggaatttggtgcctcagctgaaacagttcgagttgaggaagaagaagaggaagactggctggatgatactactgagcaatcagagattgagccagaaccagaacctacacctgaagaaccagttaatcagtttactggttatttaaaacttactgacaatgttgccattaaatgtgttgacatcgttaaggaggcacaaagtgctaatcctatggtgattgtaaatgctgctaacatacacctgaaacatggtggtggtgtagcaggtgcactcaacaaggcaaccaatggtgccatgcaaaaggagagtgatgattacattaagctaaatggccctcttacagtaggagggtcttgtttgctttctggacataatcttgctaagaagtgtctgcatgttgttggacctaacctaaatgctggtgaggacatccagcttcttaaggcagcatatgaaaatttcaattcacaggacatcttacttgcaccattgttgtcagcaggcatatttggtgctaaaccacttcagtctttacaagtgtgcgtgcagacggttcgtacacaggtttatattgcagtcaatgacaaagctctttatgagcaggttgtcatggattatcttgataacctgaagcctagagtggaagcacctaaacaagaggagccaccaaacacagaagattccaaaactgaggagaaatctgtcgtacagaagcctgtcgatgtgaagccaaaaattaaggcctgcattgatgaggttaccacaacactggaagaaactaagtttcttaccaataagttactcttgtttgctgatatcaatggtaagctttaccatgattctcagaacatgcttagaggtgaagatatgtctttccttgagaaggatgcaccttacatggtaggtgatgttatcactagtggtgatatcacttgtgttgtaataccctccaaaaaggctggtggcactactgagatgctctcaagagctttgaagaaagtgccagttgatgagtatataaccacgtaccctggacaaggatgtgctggttatacacttgaggaagctaagactgctcttaagaaatgcaaatctgcattttatgtactaccttcagaagcacctaatgctaaggaagagattctaggaactgtatcctggaatttgagagaaatgcttgctcatgctgaagagacaagaaaattaatgcctatatgcatggatgttagagccataatggcaaccatccaacgtaagtataaaggaattaaaattcaagagggcatcgttgactatggtgtccgattcttcttttatactagtaaagagcctgtagcttctattattacgaagctgaactctctaaatgagccgcttgtcacaatgccaattggttatgtgacacatggttttaatcttgaagaggctgcgcgctgtatgcgttctcttaaagctcctgccgtagtgtcagtatcatcaccagatgctgttactacatataatggatacctcacttcgtcatcaaagacatctgaggagcactttgtagaaacagtttctttggctggctcttacagagattggtcctattcaggacagcgtacagagttaggtgttgaatttcttaagcgtggtgacaaaattgtgtaccacactctggagagccccgtcgagtttcatcttgacggtgaggttctttcacttgacaaactaaagagtctcttatccctgcgggaggttaagactataaaagtgttcacaactgtggacaacactaatctccacacacagcttgtggatatgtctatgacatatggacagcagtttggtccaacatacttggatggtgctgatgttacaaaaattaaacctcatgtaaatcatgagggtaagactttctttgtactacctagtgatgacacactacgtagtgaagctttcgagtactaccatactcttgatgagagttttcttggtaggtacatgtctgctttaaaccacacaaagaaatggaaatttcctcaagttggtggtttaacttcaattaaatgggctgataacaattgttatttgtctagtgttttattagcacttcaacagcttgaagtcaaattcaatgcaccagcacttcaagaggcttattatagagcccgtgctggtgatgctgctaacttttgtgcactcatactcgcttacagtaataaaactgttggcgagcttggtgatgtcagagaaactatgacccatcttctacagcatgctaatttggaatctgcaaagcgagttcttaatgtggtgtgtaaacattgtggtcagaaaactactaccttaacgggtgtagaagctgtgatgtatatgggtactctatcttatgataatcttaagacaggtgtttccattccatgtgtgtgtggtcgtgatgctacacaatatctagtacaacaagagtcttcttttgttatgatgtctgcaccacctgctgagtataaattacagcaaggtacattcttatgtgcgaatgagtacactggtaactatcagtgtggtcattacactcatataactgctaaggagaccctctatcgtattgacggagctcaccttacaaagatgtcagagtacaaaggaccagtgactgatgttttctacaaggaaacatcttacactacaaccatcaagcctgtgtcgtataaactcgatggagttacttacacagagattgaaccaaaattggatgggtattataaaaaggataatgcttactatacagagcagcctatagaccttgtaccaactcaaccattaccaaatgcgagttttgataatttcaaactcacatgttctaacacaaaatttgctgatgatttaaatcaaatgacaggcttcacaaagccagcttcacgagagctatctgtcacattcttcccagacttgaatggcgatgtagtggctattgactatagacactattcagcgagtttcaagaaaggtgctaaattactgcataagccaattgtttggcacattaaccaggctacaaccaagacaacgttcaaaccaaacacttggtgtttacgttgtctttggagtacaaagccagtagatacttcaaattcatttgaagttctggcagtagaagacacacaaggaatggacaatcttgcttgtgaaagtcaacaacccacctctgaagaagtagtggaaaatcctaccatacagaaggaagtcatagagtgtgacgtgaaaactaccgaagttgtaggcaatgtcatacttaaaccatcagatgaaggtgttaaagtaacacaagagttaggtcatgaggatcttatggctgcttatgtggaaaacacaagcattaccattaagaaacctaatgagctttcactagccttaggtttaaaaacaattgccactcatggtattgctgcaattaatagtgttccttggagtaaaattttggcttatgtcaaaccattcttaggacaagcagcaattacaacatcaaattgcgctaagagattagcacaacgtgtgtttaacaattatatgccttatgtgtttacattattgttccaattgtgtacttttactaaaagtaccaattctagaattagagcttcactacctacaactattgctaaaaatagtgttaagagtgttgctaaattatgtttggatgccggcattaattatgtgaagtcacccaaattttctaaattgttcacaatcgctatgtggctattgttgttaagtatttgcttaggttctctaatctgtgtaactgctgcttttggtgtactcttatctaattttggtgctccttcttattgtaatggcgttagagaattgtatcttaattcgtctaacgttactactatggatttctgtgaaggttcttttccttgcagcatttgtttaagtggattagactcccttgattcttatccagctcttgaaaccattcaggtgacgatttcatcgtacaagctagacttgacaattttaggtctggccgctgagtgggttttggcatatatgttgttcacaaaattcttttatttattaggtctttcagctataatgcaggtgttctttggctattttgctagtcatttcatcagcaattcttggctcatgtggtttatcattagtattgtacaaatggcacccgtttctgcaatggttaggatgtacatcttctttgcttctttctactacatatggaagagctatgttcatatcatggatggttgcacctcttcgacttgcatgatgtgctataagcgcaatcgtgccacacgcgttgagtgtacaactattgttaatggcatgaagagatctttctatgtctatgcaaatggaggccgtggcttctgcaagactcacaattggaattgtctcaattgtgacacattttgcactggtagtacattcattagtgatgaagttgctcgtgatttgtcactccagtttaaaagaccaatcaaccctactgaccagtcatcgtatattgttgatagtgttgctgtgaaaaatggcgcgcttcacctctactttgacaaggctggtcaaaagacctatgagagacatccgctctcccattttgtcaatttagacaatttgagagctaacaacactaaaggttcactgcctattaatgtcatagtttttgatggcaagtccaaatgcgacgagtctgcttctaagtctgcttctgtgtactacagtcagctgatgtgccaacctattctgttgcttgaccaagctcttgtatcagacgttggagatagtactgaagtttccgttaagatgtttgatgcttatgtcgacaccttttcagcaacttttagtgttcctatggaaaaacttaaggcacttgttgctacagctcacagcgagttagcaaagggtgtagctttagatggtgtcctttctacattcgtgtcagctgcccgacaaggtgttgttgataccgatgttgacacaaaggatgttattgaatgtctcaaactttcacatcactctgacttagaagtgacaggtgacagttgtaacaatttcatgctcacctataataaggttgaaaacatgacgcccagagatcttggcgcatgtattgactgtaatgcaaggcatatcaatgcccaagtagcaaaaagtcacaatgtttcactcatctggaatgtaaaagactacatgtctttatctgaacagctgcgtaaacaaattcgtagtgctgccaagaagaacaacataccttttagactaacttgtgctacaactagacaggttgtcaatgtcataactactaaaatctcactcaagggtggtaagattgttagtacttgttttaaacttatgcttaaggccacattattgtgcgttcttgctgcattggtttgttatatcgttatgccagtacatacattgtcaatccatgatggttacacaaatgaaatcattggttacaaagccattcaggatggtgtcactcgtgacatcatttctactgatgattgttttgcaaataaacatgctggttttgacgcatggtttagccagcgtggtggttcatacaaaaatgacaaaagctgccctgtagtagctgctatcattacaagagagattggtttcatagtgcctggcttaccgggtactgtgctgagagcaatcaatggtgacttcttgcattttctacctcgtgtttttagtgctgttggcaacatttgctacacaccttccaaactcattgagtatagtgattttgctacctctgcttgcgttcttgctgctgagtgtacaatttttaaggatgctatgggcaaacctgtgccatattgttatgacactaatttgctagagggttctatttcttatagtgagcttcgtccagacactcgttatgtgcttatggatggttccatcatacagtttcctaacatttacctggagggttctgttagagtagtaacaacttttgatgctgagtactgtagacatggtacatgcgaaaggtcagaagtaggtatttgcctatctaccagtggtagatgggttcttaataatgagcattacagagctctatcaggagttttctgtggtgttgatgcgatgaatctcatagctaacatctttactcctcttgtgcaacctgtgggtgctttagatgtgtctgcttcagtagtggctggtggtattattgccatattggtgacttgtgctgcctactactttatgaaattcagacgtgtttttggtgagtacaaccatgttgttgctgctaatgcacttttgtttttgatgtctttcactatactctgtctggtaccagcttacagctttctgccgggagtctactcagtcttttacttgtacttgacattctatttcaccaatgatgtttcattcttggctcaccttcaatggtttgccatgttttctcctattgtgcctttttggataacagcaatctatgtattctgtatttctctgaagcactgccattggttctttaacaactatcttaggaaaagagtcatgtttaatggagttacatttagtaccttcgaggaggctgctttgtgtacctttttgctcaacaaggaaatgtacctaaaattgcgtagcgagacactgttgccacttacacagtataacaggtatcttgctctatataacaagtacaagtatttcagtggagccttagatactaccagctatcgtgaagcagcttgctgccacttagcaaaggctctaaatgactttagcaactcaggtgctgatgttctctaccaaccaccacagacatcaatcacttctgctgttctgcagagtggttttaggaaaatggcattcccgtcaggcaaagttgaagggtgcatggtacaagtaacctgtggaactacaactcttaatggattgtggttggatgacacagtatactgtccaagacatgtcatttgcacagcagaagacatgcttaatcctaactatgaagatctgctcattcgcaaatccaaccatagctttcttgttcaggctggcaatgttcaacttcgtgttattggccattctatgcaaaattgtctgcttaggcttaaagttgatacttctaaccctaagacacccaagtataaatttgtccgtatccaacctggtcaaacattttcagttctagcatgctacaatggttcaccatctggtgtttatcagtgtgccatgagacctaatcataccattaaaggttctttccttaatggatcatgtggtagtgttggttttaacattgattatgattgcgtgtctttctgctatatgcatcatatggagcttccaacaggagtacacgctggtactgacttagaaggtaaattctatggtccatttgttgacagacaaactgcacaggctgcaggtacagacacaaccataacattaaatgttttggcatggctgtatgctgctgttatcaatggtgataggtggtttcttaatagattcaccactactttgaatgactttaaccttgtggcaatgaagtacaactatgaacctttgacacaagatcatgttgacatattgggacctctttctgctcaaacaggaattgccgtcttagatatgtgtgctgctttgaaagagctgctgcagaatggtatgaatggtcgtactatccttggtagcactattttagaagatgagtttacaccatttgatgttgttagacaatgctctggtgttaccttccaaggtaagttcaagaaaattgttaagggcactcatcattggatgcttttaactttcttgacatcactattgattcttgttcaaagtacacagtggtcactgtttttctttgtttacgagaatgctttcttgccatttactcttggtattatggcaattgctgcatgtgctatgctgcttgttaagcataagcacgcattcttgtgcttgtttctgttaccttctcttgcaacagttgcttactttaatatggtctacatgcctgctagctgggtgatgcgtatcatgacatggcttgaattggctgacactagcttgtctggttataggcttaaggattgtgttatgtatgcttcagctttagttttgcttattctcatgacagctcgcactgtttatgatgatgctgctagacgtgtttggacactgatgaatgtcattacacttgtttacaaagtctactatggtaatgctttagatcaagctatttccatgtgggccttagttatttctgtaacctctaactattctggtgtcgttacgactatcatgtttttagctagagctatagtgtttgtgtgtgttgagtattacccattgttatttattactggcaacaccttacagtgtatcatgcttgtttattgtttcttaggctattgttgctgctgctactttggccttttctgtttactcaaccgttacttcaggcttactcttggtgtttatgactacttggtctctacacaagaatttaggtatatgaactcccaggggcttttgcctcctaagagtagtattgatgctttcaagcttaacattaagttgttgggtattggaggtaaaccatgtatcaaggttgctactgtacagtctaaaatgtctgacgtaaagtgcacatctgtggtactgctctcggttcttcaacaacttagagtagagtcatcttctaaattgtgggcacaatgtgtacaactccacaatgatattcttcttgcaaaagacacaactgaagctttcgagaagatggtttctcttttgtctgttttgctatccatgcagggtgctgtagacattaataggttgtgcgaggaaatgctcgataaccgtgctactcttcaggctattgcttcagaatttagttctttaccatcatatgccgcttatgccactgcccaggaggcctatgagcaggctgtagctaatggtgattctgaagtcgttctcaaaaagttaaagaaatctttgaatgtggctaaatctgagtttgaccgtgatgctgccatgcaacgcaagttggaaaagatggcagatcaggctatgacccaaatgtacaaacaggcaagatctgaggacaagagggcaaaagtaactagtgctatgcaaacaatgctcttcactatgcttaggaagcttgataatgatgcacttaacaacattatcaacaatgcgcgtgatggttgtgttccactcaacatcataccattgactacagcagccaaactcatggttgttgtccctgattatggtacctacaagaacacttgtgatggtaacacctttacatatgcatctgcactctgggaaatccagcaagttgttgatgcggatagcaagattgttcaacttagtgaaattaacatggacaattcaccaaatttggcttggcctcttattgttacagctctaagagccaactcagctgttaaactacagaataatgaactgagtccagtagcactacgacagatgtcctgtgcggctggtaccacacaaacagcttgtactgatgacaatgcacttgcctactataacaattcgaagggaggtaggtttgtgctggcattactatcagaccaccaagatctcaaatgggctagattccctaagagtgatggtacaggtacaatttacacagaactggaaccaccttgtaggtttgttacagacacaccaaaagggcctaaagtgaaatacttgtacttcatcaaaggcttaaacaacctaaatagaggtatggtgctgggcagtttagctgctacagtacgtcttcaggctggaaatgctacagaagtacctgccaattcaactgtgctttccttctgtgcttttgcagtagaccctgctaaagcatataaggattacctagcaagtggaggacaaccaatcaccaactgtgtgaagatgttgtgtacacacactggtacaggacaggcaattactgtaacaccagaagctaacatggaccaagagtcctttggtggtgcttcatgttgtctgtattgtagatgccacattgaccatccaaatcctaaaggattctgtgacttgaaaggtaagtacgtccaaatacctaccacttgtgctaatgacccagtgggttttacacttagaaacacagtctgtaccgtctgcggaatgtggaaaggttatggctgtagttgtgaccaactccgcgaacccttgatgcagtctgcggatgcatcaacgtttttaaacgggtttgcggtgtaagtgcagcccgtcttacaccgtgcggcacaggcactagtactgatgtcgtctacagggcttttgatatttacaacgaaaaagttgctggttttgcaaagttcctaaaaactaattgctgtcgcttccaggagaaggatgaggaaggcaatttattagactcttactttgtagttaagaggcatactatgtctaactaccaacatgaagagactatttataacttggttaaagattgtccagcggttgctgtccatgactttttcaagtttagagtagatggtgacatggtaccacatatatcacgtcagcgtctaactaaatacacaatggctgatttagtctatgctctacgtcattttgatgagggtaattgtgatacattaaaagaaatactcgtcacatacaattgctgtgatgatgattatttcaataagaaggattggtatgacttcgtagagaatcctgacatcttacgcgtatatgctaacttaggtgagcgtgtacgccaatcattattaaagactgtacaattctgcgatgctatgcgtgatgcaggcattgtaggcgtactgacattagataatcaggatcttaatgggaactggtacgatttcggtgatttcgtacaagtagcaccaggctgcggagttcctattgtggattcatattactcattgctgatgcccatcctcactttgactagggcattggctgctgagtcccatatggatgctgatctcgcaaaaccacttattaagtgggatttgctgaaatatgattttacggaagagagactttgtctcttcgaccgttattttaaatattgggaccagacataccatcccaattgtattaactgtttggatgataggtgtatccttcattgtgcaaactttaatgtgttattttctactgtgtttccacctacaagttttggaccactagtaagaaaaatatttgtagatggtgttccttttgttgtttcaactggataccattttcgtgagttaggagtcgtacataatcaggatgtaaacttacatagctcgcgtctcagtttcaaggaacttttagtgtatgctgctgatccagctatgcatgcagcttctggcaatttattgctagataaacgcactacatgcttttcagtagctgcactaacaaacaatgttgcttttcaaactgtcaaacccggtaattttaataaagacttttatgactttgctgtgtctaaaggtttctttaaggaaggaagttctgttgaactaaaacacttcttctttgctcaggatggcaacgctgctatcagtgattatgactattatcgttataatctgccaacaatgtgtgatatcagacaactcctattcgtagttgaagttgttgataaatactttgattgttacgatggtggctgtattaatgccaaccaagtaatcgttaacaatctggataaatcagctggtttcccatttaataaatggggtaaggctagactttattatgactcaatgagttatgaggatcaagatgcacttttcgcgtatactaagcgtaatgtcatccctactataactcaaatgaatcttaagtatgccattagtgcaaagaatagagctcgcaccgtagctggtgtctctatctgtagtactatgacaaatagacagtttcatcagaaattattgaagtcaatagccgccactagaggagctactgtggtaattggaacaagcaagttttacggtggctggcataatatgttaaaaactgtttacagtgatgtagaaactccacaccttatgggttgggattatccaaaatgtgacagagccatgcctaacatgcttaggataatggcctctcttgttcttgctcgcaaacataacacttgctgtaacttatcacaccgtttctacaggttagctaacgagtgtgcgcaagtattaagtgagatggtcatgtgtggcggctcactatatgttaaaccaggtggaacatcatccggtgatgctacaactgcttatgctaatagtgtctttaacatttgtcaagctgttacagccaatgtaaatgcacttctttcaactgatggtaataagatagctgacaagtatgtccgcaatctacaacacaggctctatgagtgtctctatagaaatagggatgttgatcatgaattcgtggatgagttttacgcttacctgcgtaaacatttctccatgatgattctttctgatgatgccgttgtgtgctataacagtaactatgcggctcaaggtttagtagctagcattaagaactttaaggcagttctttattatcaaaataatgtgttcatgtctgaggcaaaatgttggactgagactgaccttactaaaggacctcacgaattttgctcacagcatacaatgctagttaaacaaggagatgattacgtgtacctgccttacccagatccatcaagaatattaggcgcaggctgttttgtcgatgatattgtcaaaacagatggtacacttatgattgaaaggttcgtgtcactggctattgatgcttacccacttacaaaacatcctaatcaggagtatgctgatgtctttcacttgtatttacaatacattagaaagttacatgatgagcttactggccacatgttggacatgtattccgtaatgctaactaatgataacacctcacggtactgggaacctgagttttatgaggctatgtacacaccacatacagtcttgcaggctgtaggtgcttgtgtattgtgcaattcacagacttcacttcgttgcggtgcctgtattaggagaccattcctatgttgcaagtgctgctatgaccatgtcatttcaacatcacacaaattagtgttgtctgttaatccctatgtttgcaatgccccaggttgtgatgtcactgatgtgacacaactgtatctaggaggtatgagctattattgcaagtcacataagcctcccattagttttccattatgtgctaatggtcaggtttttggtttatacaaaaacacatgtgtaggcagtgacaatgtcactgacttcaatgcgatagcaacatgtgattggactaatgctggcgattacatacttgccaacacttgtactgagagactcaagcttttcgcagcagaaacgctcaaagccactgaggaaacatttaagctgtcatatggtattgccactgtacgcgaagtactctctgacagagaattgcatctttcatgggaggttggaaaacctagaccaccattgaacagaaactatgtctttactggttaccgtgtaactaaaaatagtaaagtacagattggagagtacacctttgaaaaaggtgactatggtgatgctgttgtgtacagaggtactacgacatacaagttgaatgttggtgattactttgtgttgacatctcacactgtaatgccacttagtgcacctactctagtgccacaagagcactatgtgagaattactggcttgtacccaacactcaacatctcagatgagttttctagcaatgttgcaaattatcaaaaggtcggcatgcaaaagtactctacactccaaggaccacctggtactggtaagagtcattttgccatcggacttgctctctattacccatctgctcgcatagtgtatacggcatgctctcatgcagctgttgatgccctatgtgaaaaggcattaaaatatttgcccatagataaatgtagtagaatcatacctgcgcgtgcgcgcgtagagtgttttgataaattcaaagtgaattcaacactagaacagtatgttttctgcactgtaaatgcattgccagaaacaactgctgacattgtagtctttgatgaaatctctatggctactaattatgacttgagtgttgtcaatgctagacttcgtgcaaaacactacgtctatattggcgatcctgctcaattaccagccccccgcacattgctgactaaaggcacactagaatcagaatattttaattcagtgtgcagacttatgaaaacaataggtccagacatgttccttggaacttgtcgccgttgtcctgctgaaattgttgacactgtgagtgctttagtttatgacaataagctaaaagcacacaaggagaagtcagctcaatgcttcaaaatgttctacaaaggtgttattacacatgatgtttcatctgcaatcaacagacctcaaataggcgttgtaagagaatttcttacacgcaatcctgcttggagaaaagctgtttttatctcaccttataattcacagaacgctgtagcttcaaaaatcttaggattgcctacgcagactgttgattcatcacagggttctgaatatgactatgtcatattcacacaaactactgaaacagcacactcttgtaatgtcaaccgcttcaatgtggctatcacaagggcaaaaattggcattttgtgcataatgtctgatagagatctttatgacaaactgcaatttacaagtctagaaataccacgtcgcaatgtggctacattacaagcagaaaatgtaactggactttttaaggactgtagtaagatcattactggtcttcatcctacacaggcacctacacacctcagcgttgatataaagttcaagactgaaggattatgtgttgacataccaggcataccaaaggacatgacctaccgtagactcatctctatgatgggtttcaaaatgaattaccaagtcaatggttaccctaatatgtttatcacccgcgaagaagctattcgtcacgttcgtgcgtggattggctttgatgtagagggctgtcatgcaactagagatgctgtgggtactaacctacctctccagctaggattttctacaggtgttaacttagtagctgtaccgactggttatgttgacactgaaaataacacagaattcaccagagttaatgcaaaacctccaccaggtgaccagtttaaacatcttataccactcatgtataaaggcttgccctggaatgtagtgcgtattaagatagtacaaatgctcagtgatacactgaaaggattgtcagacagagtcgtgttcgtcctttgggcgcatggctttgagcttacatcaatgaagtactttgtcaagattggacctgaaagaacgtgttgtctgtgtgacaaacgtgcaacttgcttttctacttcatcagatacttatgcctgctggaatcattctgtgggttttgactatgtctataacccatttatgattgatgttcagcagtggggctttacgggtaaccttcagagtaaccatgaccaacattgccaggtacatggaaatgcacatgtggctagttgtgatgctatcatgactagatgtttagcagtccatgagtgctttgttaagcgcgttgattggtctgttgaataccctattataggagatgaactgagggttaattctgcttgcagaaaagtacaacacatggttgtgaagtctgcattgcttgctgataagtttccagttcttcatgacattggaaatccaaaggctatcaagtgtgtgcctcaggctgaagtagaatggaagttctacgatgctcagccatgtagtgacaaagcttacaaaatagaggaactcttctattcttatgctacacatcacgataaattcactgatggtgtttgtttgttttggaattgtaacgttgatcgttacccagccaatgcaattgtgtgtaggtttgacacaagagtcttgtcaaacttgaacttaccaggctgtgatggtggtagtttgtatgtgaataagcatgcattccacactccagctttcgataaaagtgcatttactaatttaaagcaattgcctttcttttactattctgatagtccttgtgagtctcatggcaaacaagtagtgtcggatattgattatgttccactcaaatctgctacgtgtattacacgatgcaatttaggtggtgctgtttgcagacaccatgcaaatgagtaccgacagtacttggatgcatataatatgatgatttctgctggatttagcctatggatttacaaacaatttgatacttataacctgtggaatacatttaccaggttacagagtttagaaaatgtggcttataatgttgttaataaaggacactttgatggacacgccggcgaagcacctgtttccatcattaataatgctgtttacacaaaggtagatggtattgatgtggagatctttgaaaataagacaacacttcctgttaatgttgcatttgagctttgggctaagcgtaacattaaaccagtgccagagattaagatactcaataatttgggtgttgatatcgctgctaatactgtaatctgggactacaaaagagaagccccagcacatgtatctacaataggtgtctgcacaatgactgacattgccaagaaacctactgagagtgcttgttcttcacttactgtcttgtttgatggtagagtggaaggacaggtagacctttttagaaacgcccgtaatggtgttttaataacagaaggttcagtcaaaggtctaacaccttcaaagggaccagcacaagctagcgtcaatggagtcacattaattggagaatcagtaaaaacacagtttaactactttaagaaagtagacggcattattcaacagttgcctgaaacctactttactcagagcagagacttagaggattttaagcccagatcacaaatggaaactgactttctcgagctcgctatggatgaattcatacagcgatataagctcgagggctatgccttcgaacacatcgtttatggagatttcagtcatggacaacttggcggtcttcatttaatgataggcttagccaagcgctcacaagattcaccacttaaattagaggattttatccctatggacagcacagtgaaaaattacttcataacagatgcgcaaacaggttcatcaaaatgtgtgtgttctgtgattgatcttttacttgatgactttgtcgagataataaagtcacaagatttgtcagtgatttcaaaagtggtcaaggttacaattgactatgctgaaatttcattcatgctttggtgtaaggatggacatgttgaaaccttctacccaaaactacaagcaagtcaagcgtggcaaccaggtgttgcgatgcctaacttgtacaagatgcaaagaatgcttcttgaaaagtgtgaccttcagaattatggtgaaaatgctgttataccaaaaggaataatgatgaatgtcgcaaagtatactcaactgtgtcaatacttaaatacacttactttagctgtaccctacaacatgagagttattcactttggtgctggctctgataaaggagttgcaccaggtacagctgtgctcagacaatggttgccaactggcacactacttgtcgattcagatcttaatgacttcgtctccgacgcagattctactttaattggagactgtgcaacagtacatacggctaataaatgggaccttattattagcgatatgtatgaccctaggaccaaacatgtgacaaaagagaatgactctaaagaagggtttttcacttatctgtgtggatttataaagcaaaaactagccctgggtggttctatagctgtaaagataacagagcattcttggaatgctgacctttacaagcttatgggccatttctcatggtggacagcttttgttacaaatgtaaatgcatcatcatcggaagcatttttaattggggctaactatcttggcaagccgaaggaacaaattgatggctataccatgcatgctaactacattttctggaggaacacaaatcctatccagttgtcttcctattcactctttgacatgagcaaatttcctcttaaattaagaggaactgctgtaatgtctcttaaggagaatcaaatcaatgatatgatttattctcttctggaaaaaggtaggcttatcattagagaaaacaacagagttgtggtttcaagtgatattcttgttaacaactaaacgaacatgtttattttcttattatttcttactctcactagtggtagtgaccttgaccggtgcaccacttttgatgatgttcaagctcctaattacactcaacatacttcatctatgaggggggtttactatcctgatgaaatttttagattagacactctttatttaactcaggatttatttcttccattttattctaatgttacagggtttcatactattaatcatacgtttgacaaccctgtcataccttttaaggatggtatttattttgctgccacagagaaatcaaatgttgtccgtggttgggtttttggttctaccatgaacaacaagtcacagtcggtgattattattaacaattctactaatgttgttatacgagcatgtaactttgaattgtgtgacaaccctttctttgctgtttctaaacccatgggtacacagacacatactatgatattcgataatgcatttaattgcactttcgagtacatatctgatgccttttcgcttgatgtttcagaaaagtcaggtaattttaaacacttacgagagtttgtgtttaaaaataaagatgggtttctctatgtttataagggctatcaacctatagatgtagttcgtgatctaccttctggttttaacactttgaaacctatttttaagttgcctcttggtattaacattacaaattttagagccattcttacagccttttcacctgctcaagacacttggggcacgtcagctgcagcctattttgttggctatttaaagccaactacatttatgctcaagtatgatgaaaatggtacaatcacagatgctgttgattgttctcaaaatccacttgctgaactcaaatgctctgttaagagctttgagattgacaaaggaatttaccagacctctaatttcagggttgttccctcaggagatgttgtgagattccctaatattacaaacttgtgtccttttggagaggtttttaatgctactaaattcccttctgtctatgcatgggagagaaaaaaaatttctaattgtgttgctgattactctgtgctctacaactcaacatttttttcaacctttaagtgctatggcgtttctgccactaagttgaatgatctttgcttctccaatgtctatgcagattcttttgtagtcaagggagatgatgtaagacaaatagcgccaggacaaactggtgttattgctgattataattataaattgccagatgatttcatgggttgtgtccttgcttggaatactaggaacattgatgctacttcaactggtaattataattataaatataggtatcttagacatggcaagcttaggccctttgagagagacatatctaatgtgcctttctcccctgatggcaaaccttgcaccccacctgctcttaattgttattggccattaaatgattatggtttttacaccactactggcattggctaccaaccttacagagttgtagtactttcttttgaacttttaaatgcaccggccacggtttgtggaccaaaattatccactgaccttattaagaaccagtgtgtcaattttaattttaatggactcactggtactggtgtgttaactccttcttcaaagagatttcaaccatttcaacaatttggccgtgatgtttctgatttcactgattccgttcgagatcctaaaacatctgaaatattagacatttcaccttgctcttttgggggtgtaagtgtaattacacctggaacaaatgcttcatctgaagttgctgttctatatcaagatgttaactgcactgatgtttctacagcaattcatgcagatcaactcacaccagcttggcgcatatattctactggaaacaatgtattccagactcaagcaggctgtcttataggagctgagcatgtcgacacttcttatgagtgcgacattcctattggagctggcatttgtgctagttaccatacagtttctttattacgtagtactagccaaaaatctattgtggcttatactatgtctttaggtgctgatagttcaattgcttactctaataacaccattgctatacctactaacttttcaattagcattactacagaagtaatgcctgtttctatggctaaaacctccgtagattgtaatatgtacatctgcggagattctactgaatgtgctaatttgcttctccaatatggtagcttttgcacacaactaaatcgtgcactctcaggtattgctgctgaacaggatcgcaacacacgtgaagtgttcgctcaagtcaaacaaatgtacaaaaccccaactttgaaagattttggtggttttaatttttcacaaatattacctgaccctctaaagccaactaagaggtcttttattgaggacttgctctttaataaggtgacactcgctgatgctggcttcatgaagcaatatggcgaatgcctaggtgatattaatgctagagatctcatttgtgcgcagaagttcaatggacttacagtgttgccacctctgctcactgatgatatgattgctgcctacactgctgctctagttagtggtactgccactgctggatggacatttggtgctggcgctgctcttcaaataccttttgctatgcaaatggcatataggttcaatggcattggagttacccaaaatgttctctatgagaaccaaaaacaaatcgccaaccaatttaacaaggcgattagtcaaattcaagaatcacttacaacaacatcaactgcattgggcaagctgcaagacgttgttaaccagaatgctcaagcattaaacacacttgttaaacaacttagctctaattttggtgcaatttcaagtgtgctaaatgatatcctttcgcgacttgataaagtcgaggcggaggtacaaattgacaggttaattacaggcagacttcaaagccttcaaacctatgtaacacaacaactaatcagggctgctgaaatcagggcttctgctaatcttgctgctactaaaatgtctgagtgtgttcttggacaatcaaaaagagttgacttttgtggaaagggctaccaccttatgtccttcccacaagcagccccgcatggtgttgtcttcctacatgtcacgtatgtgccatcccaggagaggaacttcaccacagcgccagcaatttgtcatgaaggcaaagcatacttccctcgtgaaggtgtttttgtgtttaatggcacttcttggtttattacacagaggaacttcttttctccacaaataattactacagacaatacatttgtctcaggaaattgtgatgtcgttattggcatcattaacaacacagtttatgatcctctgcaacctgagcttgactcattcaaagaagagctggacaagtacttcaaaaatcatacatcaccagatgttgatcttggcgacatttcaggcattaacgcttctgtcgtcaacattcaaaaagaaattgaccgcctcaatgaggtcgctaaaaatttaaatgaatcactcattgaccttcaagaattgggaaaatatgagcaatatattaaatggccttggtatgtttggctcggcttcattgctggactaattgccatcgtcatggttacaatcttgctttgttgcatgactagttgttgcagttgcctcaagggtgcatgctcttgtggttcttgctgcaagtttgatgaggatgactctgagccagttctcaagggtgtcaaattacattacacataaacgaacttatggatttgtttatgagattttttactcttggatcaattactgcacagccagtaaaaattgacaatgcttctcctgcaagtactgttcatgctacagcaacgataccgctacaagcctcactccctttcggatggcttgttattggcgttgcatttcttgctgtttttcagagcgctaccaaaataattgcgctcaataaaagatggcagctagccctttataagggcttccagttcatttgcaatttactgcagctatttgttaccatctattcacatcttttgcttgtcgctgcaggtatggaggcgcaatttttgtacctctatgccttgatatattttctacaatgcatcaacgcatgtagaattattatgagatgttggctttgttggaagtgcaaatccaagaacccattactttatgatgccaactactttgtttgctggcacacacataactatgactactgtataccatataacagtgtcacagatacaattgtcgttactgaaggtgacggcatttcaacaccaaaactcaaagaagactaccaaattggtggttattctgaggataggcactcaggtgttaaagactatgtcgttgtacatggctatttcaccgaagtttactaccagcttgagtctacacaaattactacagacactggtattgaaaatgctacattcttcatctttaacaagcttgttaaagacccaccgaatgtgcaaatacacacaatcgacggctcttcaggagttgctaatccagcaatggatccaatttatgatgagccgacgacgactactagcgtgcctttgtaagcacaagaaagtgagtacgaacttatgtactcattcgtttcggaagaaacaggtacgttaatagttaatagcgtacttctttttcttgctttcgtggtattcttgctagtcacactagccatccttactgcgcttcgattgtgtgcgtactgctgcaatattgttaacgtgagtttagtaaaaccaacggtttacgtctactcgcgtgttaaaaatctgaactcttctgaaggagttcctgatcttctggtctaaacgaactaactattattattattctgtttggaactttaacattgcttatcatggcagacaacggtactattaccgttgaggagcttaaacaactcctggaacaatggaacctagtaataggtttcctattcctagcctggattatgttactacaatttgcctattctaatcggaacaggtttttgtacataataaagcttgttttcctctggctcttgtggccagtaacacttgcttgttttgtgcttgctgctgtctacagaattaattgggtgactggcgggattgcgattgcaatggcttgtattgtaggcttgatgtggcttagctacttcgttgcttccttcaggctgtttgctcgtacccgctcaatgtggtcattcaacccagaaacaaacattcttctcaatgtgcctctccgggggacaattgtgaccagaccgctcatggaaagtgaacttgtcattggtgctgtgatcattcgtggtcacttgcgaatggccggacactccctagggcgctgtgacattaaggacctgccaaaagagatcactgtggctacatcacgaacgctttcttattacaaattaggagcgtcgcagcgtgtaggcactgattcaggttttgctgcatacaaccgctaccgtattggaaactataaattaaatacagaccacgccggtagcaacgacaatattgctttgctagtacagtaagtgacaacagatgtttcatcttgttgacttccaggttacaatagcagagatattgattatcattatgaggactttcaggattgctatttggaatcttgacgttataataagttcaatagtgagacaattatttaagcctctaactaagaagaattattcggagttagatgatgaagaacctatggagttagattatccataaaacgaacatgaaaattattctcttcctgacattgattgtatttacatcttgcgagctatatcactatcaggagtgtgttagaggtacgactgtactactaaaagaaccttgcccatcaggaacatacgagggcaattcaccatttcaccctcttgctgacaataaatttgcactaacttgcactagcacacactttgcttttgcttgtgctgacggtactcgacatacctatcagctgcgtgcaagatcagtttcaccaaaacttttcatcagacaagaggaggttcaacaagagctctactcgccactttttctcattgttgctgctctagtatttttaatactttgcttcaccattaagagaaagacagaatgaatgagctcactttaattgacttctatttgtgctttttagcctttctgctattccttgttttaataatgcttattatattttggttttcactcgaaatccaggatctagaagaaccttgtaccaaagtctaaacgaacatgaaacttctcattgttttgacttgtatttctctatgcagttgcatacgcactgtagtacagcgctgtgcatctaataaacctcatgtgcttgaagatccttgtaaggtacaacactaggggtaatacttatagcactgcttggctttgtgctctaggaaaggttttaccttttcatagatggcacactatggttcaaacatgcacacctaatgttactatcaactgtcaagatccagctggtggtgcgcttatagctaggtgttggtaccttcatgaaggtcaccaaactgctgcatttagagacgtacttgttgttttaaataaacgaacaaattaaaatgtctgataatggaccccaatcaaaccaacgtagtgccccccgcattacatttggtggacccacagattcaactgacaataaccagaatggaggacgcaatggggcaaggccaaaacagcgccgaccccaaggtttacccaataatactgcgtcttggttcacagctctcactcagcatggcaaggaggaacttagattccctcgaggccagggcgttccaatcaacaccaatagtggtccagatgaccaaattggctactaccgaagagctacccgacgagttcgtggtggtgacggcaaaatgaaagagctcagccccagatggtacttctattacctaggaactggcccagaagcttcacttccctacggcgctaacaaagaaggcatcgtatgggttgcaactgagggagccttgaatacacccaaagaccacattggcacccgcaatcctaataacaatgctgccaccgtgctacaacttcctcaaggaacaacattgccaaaaggcttctacgcagagggaagcagaggcggcagtcaagcctcttctcgctcctcatcacgtagtcgcggtaattcaagaaattcaactcctggcagcagtaggggaaattctcctgctcgaatggctagcggaggtggtgaaactgccctcgcgctattgctgctagacagattgaaccagcttgagagcaaagtttctggtaaaggccaacaacaacaaggccaaactgtcactaagaaatctgctgctgaggcatctaaaaagcctcgccaaaaacgtactgccacaaaacagtacaacgtcactcaagcatttgggagacgtggtccagaacaaacccaaggaaatttcggggaccaagacctaatcagacaaggaactgattacaaacattggccgcaaattgcacaatttgctccaagtgcctctgcattctttggaatgtcacgcattggcatggaagtcacaccttcgggaacatggctgacttatcatggagccattaaattggatgacaaagatccacaattcaaagacaacgtcatactgctgaacaagcacattgacgcatacaaaacattcccaccaacagagcctaaaaaggacaaaaagaaaaagactgatgaagctcagcctttgccgcagagacaaaagaagcagcccactgtgactcttcttcctgcggctgacatggatgatttctccagacaacttcaaaattccatgagtggagcttctgctgattcaactcaggcataaacactcatgatgaccacacaaggcagatgggctatgtaaacgttttcgcaattccgtttacgatacatagtctactcttgtgcagaatgaattctcgtaactaaacagcacaagtaggtttagttaactttaatctcacatagcaatctttaatcaatgtgtaacattagggaggacttgaaagagccaccacattttcatcgaggccacgcggagtacgatcgagggtacagtgaataatgctagggagagctgcctatatggaagagccctaatgtgtaaaattaattttagtagtgctatccccatgtgattttaatagcttcttaggagaatcacaaaaaaaa

SEQ ID NO: 29799 - DNA, 29740 bp, SARS Coronavirus
atattaggtttttacctacccaggaaaagccaaccaacctcgatctcttgtagatctgttctctaaacgaactttaaaatctgtgtagctgtcgctcggctgcatgcctagtgcacctacgcagtataaacaataataaattttactgtcgttgacaagaaacgagtaactcgtccctcttctgcagactgcttacggtttcgtccgtgttgcagtcgatcatcagcatacctaggtttcgtccgggtgtgaccgaaaggtaagatggagagccttgttcttggtgtcaacgagaaaacacacgtccaactcagtttgcctgtccttcaggttagagacgtgctagtgcgtggcttcggggactctgtggaagaggccctatcggaggcacgtgaacacctcaaaaatggcacttgtggtctagtagagctggaaaaaggcgtactgccccagcttgaacagccctatgtgttcattaaacgttctgatgccttaagcaccaatcacggccacaaggtcgttgagctggttgcagaaatggacggcattcagtacggtcgtagcggtataacactgggagtactcgtgccacatgtgggcgaaaccccaattgcataccgcaatgttcttcttcgtaagaacggtaataagggagccggtggtcatagctatggcatcgatctaaagtcttatgacttaggtgacgagcttggcactgatcccattgaagattatgaacaaaactggaacactaagcatggcagtggtgcactccgtgaactcactcgtgagctcaatggaggtgcagtcactcgctatgtcgacaacaatttctgtggcccagatgggtaccctcttgattgcatcaaagattttctcgcacgcgcgggcaagtcaatgtgcactctttccgaacaacttgattacatcgagtcgaagagaggtgtctactgctgccgtgaccatgagcatgaaattgcctggttcactgagcgctctgataagagctacgagcaccagacacccttcgaaattaagagtgccaagaaatttgacactttcaaaggggaatgcccaaagtttgtgtttcctcttaactcaaaagtcaaagtcattcaaccacgtgttgaaaagaaaaagactgagggtttcatggggcgtatacgctctgtgtaccctgttgcatctccacaggagtgtaacaatatgcacttgtctaccttgatgaaatgtaatcattgcgatgaagtttcatggcagacgtgcgactttctgaaagccacttgtgaacattgtggcactgaaaatttagttattgaaggacctactacatgtgggtacctacctactaatgctgtagtgaaaatgccatgtcctgcctgtcaagacccagagattggacctgagcatagtgttgcagattatcacaaccactcaaacattgaaactcgactccgcaagggaggtaggactagatgttttggaggctgtgtgtttgcctatgttggctgctataataagcgtgcctactgggttcctcgtgctagtgctgatattggctcaggccatactggcattactggtgacaatgtggagaccttgaatgaggatctccttgagatactgagtcgtgaacgtgttaacattaacattgttggcgattttcatttgaatgaagaggttgccatcattttggcatctttctctgcttctacaagtgcctttattgacactataaagagtcttgattacaagtctttcaaaaccattgttgagtcctgcggtaactataaagttaccaagggaaagcccgtaaaaggtgcttggaacattggacaacagagatcagttttaacaccactgtgtggttttccctcacaggctgctggtgttatcagatcaatttttgcgcgcacacttgatgcagcaaaccactcaattcctgatttgcaaagagcagctgtcaccatacttgatggtatttctgaacagtcattacgtcttgtcgacgccatggtttatacttcagacctgctcaccaacagtgtcattattatggcatatgtaactggtggtcttgtacaacagacttctcagtggttgtctaatcttttgggcactactgttgaaaaactcaggcctatctttgaatggattgaggcgaaacttagtgcaggagttgaatttctcaaggatgcttgggagattctcaaatttctcattacaggtgtttttgacatcgtcaagggtcaaatacaggttgcttcagataacatcaaggattgtgtaaaatgcttcattgatgttgttaacaaggcactcgaaatgtgcattgatcaagtcactatcgctggcgcaaagttgcgatcactcaacttaggtgaagtcttcatcgctcaaagcaagggactttaccgtcagtgtatacgtggcaaggagcagctgcaactactcatgcctcttaaggcaccaaaagaagtaacctttcttgaaggtgattcacatgacacagtacttacctctgaggaggttgttctcaagaacggtgaactcgaaacactcgagacgcccgttgatagcttcacaaatggagctatcgttggcacaccagtctgtgtaaatggcctcatgctcttagagattaaggacaaagaacaatactgcgcattgtctcctggtttactggctacaaacaatgtctttcgcttaaaagggggtgcaccaattaaaggtgtaacctttggagaagatactgtttgggaagttcaaggttacaagaatgtgagaatcacatttgagcttgatgaacgtgttgacaaagtgcttaatgaaaagtgctctgtctacactgttgaatccggtaccgaagttactgagtttgcatgtgttgtagcagaggctgttgtgaagactttacaaccagtttctgatctccttaccaacatgggtattgatcttgatgagtggagtgtagctacattctacttatttgatgatgctggtgaagaaaacttttcatcacgtatgtattgttccttttaccctccagatgaggaagaagaggacgatgcagagtgtgaggaagaagaaattgatgaaacctgtgaacatgagtacggtacagaggatgattatcaaggtctccctctggaatttggtgcctcagctgaaacagttcgagttgaggaagaagaagaggaagactggctggatgatactactgagcaatcagagattgagccagaaccagaacctacacctgaagaaccagttaatcagtttactggttatttaaaacttactgacaatgttgccattaaatgtgttgacatcgttaaggaggcacaaagtgctaatcctatggtgattgtaaatgctgctaacatacacctgaaacatggtggtggtgtagcaggtgcactcaacaaggcaaccaatggtgccatgcaaaaggagagtgatgattacattaagctaaatggccctcttacagtaggagggtcttgtttgctttctggacataatcttgctaagaagtgtctgcatgttgttggacctaacctaaatgcaggtgaggacatccagcttcttaaggcagcatatgaaaatttcaattcacaggacatcttacttgcaccattgttgtcagcaggcatatttggtgctaaaccacttcagtctttacaagtgtgcgtgcagacggttcgtacacaggtttatattgcagtcaatgacaaagctctttatgagcaggttgtcatggattatcttgataacctgaagcctagagtggaagcacctaaacaagaggagccaccaaacacagaagattccaaaactgaggagaaatctgtcgtacagaagcctgtcgatgtgaagccaaaaattaaggcctgcattgatgaggttaccacaacactggaagaaactaagtttcttaccaataagttactcttgtttgctgatatcaatggtaagctttaccatgattctcagaacatgcttagaggtgaagatatgtctttccttgagaaggatgcaccttacatggtaggtgatgttatcactagtggtgatatcacttgtgttgtaataccctccaaaaaggctggtggcactactgagatgctctcaagagctttgaagaaagtgccagttgatgagtatataaccacgtaccctggacaaggatgtgctggttatacacttgaggaagctaagactgctcttaagaaatgcaaatctgcattttatgtactaccttcagaagcacctaatgctaaggaagagattctaggaactgtatcctggaatttgagagaaatgcttgctcatgctgaagagacaagaaaattaatgcctatatgcatggatgttagagccataatggcaaccatccaacgtaagtataaaggaattaaaattcaagagggcatcgttgactatggtgtccgattcttcttttatactagtaaagagcctgtagcttctattattacgaagctgaactctctaaatgagccgcttgtcacaatgccaattggttatgtgacacatggttttaatcttgaagaggctgcgcgctgtatgcgttctcttaaagctcctgccgtagtgtcagtatcatcaccagatgctgttactacatataatggatacctcacttcgtcatcaaagacatctgaggagcactttgtagaaacagtttctttggctggctcttacagagattggtcctattcaggacagcgtacagagttaggtgttgaatttcttaagcgtggtgacaaaattgtgtaccacactctggagagccccgtcgagtttcatcttgacggtgaggttctttcacttgacaaactaaagagtctcttatccctgcgggaggttaagactataaaagtgttcacaactgtggacaacactaatctccacacacagcttgtggatatgtctatgacatatggacagcagtttggtccaacatacttggatggtgctgatgttacaaaaattaaacctcatgtaaatcatgagggtaagactttctttgtactacctagtgatgacacactacgtagtgaagctttcgagtactaccatactcttgatgagagttttcttggtaggtacatgtctgctttaaaccacacaaagaaatggaaatttcctcaagttggtggtttaacttcaattaaatgggctgataacaattgttatttgtctagtgttttattagcacttcaacagcttgaagtcaaattcaatgcaccagcacttcaagaggcttattatagagcccgtgctggtgatgctgctaacttttgtgcactcatactcgcttacagtaataaaactgttggcgagcttggtgatgtcagagaaactatgacccatcttctacagcatgctaatttggaatctgcaaagcgagttcttaatgtggtgtgtaaacattgtggtcagaaaactactaccttaacgggtgtagaagctgtgatgtatatgggtactctatcttatgataatcttaagacaggtgtttccattccatgtgtgtgtggtcgtgatgctacacaatatctagtacaacaagagtcttcttttgttatgatgtctgcaccacctgctgagtataaattacagcaaggtacattcttatgtgcgaatgagtacactggtaactatcagtgtggtcattacactcatataactgctaaggagaccctctatcgtattgacggagctcaccttacaaagatgtcagagtacaaaggaccagtgactgatgttttctacaaggaaacatcttacactacaaccatcaagcctgtgtcgtataaactcgatggagttacttacacagagattgaaccaaaattggatgggtattataaaaaggataatgcttactatacagagcagcctatagaccttgtaccaactcaaccattaccaaatgcgagttttgataatttcaaactcacatgttctaacacaaaatttgctgatgatttaaatcaaatgacaggcttcacaaagccagcttcacgagagctatctgtcacattcttcccagacttgaatggcgatgtagtggctattgactatagacactattcagcgagtttcaagaaaggtgctaaattactgcataagccaattgtttggcacattaaccaggctacaaccaagacaacgttcaaaccaaacacttggtgtttacgttgtctttggagtacaaagccagtagatacttcaaattcatttgaagttctggcagtagaagacacacaaggaatggacaatcttgcttgtgaaagtcaacaacccacctctgaagaagtagtggaaaatcctaccatacagaaggaagtcatagagtgtgacgtgaaaactaccgaagttgtaggcaatgtcatacttaaaccatcagatgaaggtgttaaagtaacacaagagttaggtcatgaggatcttatggctgcttatgtggaaaacacaagcattaccattaagaaacctaatgagctttcactagccttaggtttaaaaacaattgccactcatggtattgctgcaattaatagtgttccttggagtaaaattttggcttatgtcaaaccattcttaggacaagcagcaattacaacatcaaattgcgctaagagattagcacaacgtgtgtttaacaattatatgccttatgtgtttacattattgttccaattgtgtacttttactaaaagtaccaattctagaattagagcttcactacctacaactattgctaaaaatagtgttaagagtgttgctaaattatgtttggatgccggcattaattatgtgaagtcacccaaattttctaaattgttcacaatcgctatgtggctattgttgttaagtatttgcttaggttctctaatctgtgtaactgctgcttttggtgtactcttatctaattttggtgctccttcttattgtaatggcgttagagaattgtatcttaattcgtctaacgttactactatggatttctgtgaaggttcttttccttgcagcatttgtttaagtggattagactcccttgattcttatccagctcttgaaaccattcaggtgacgatttcatcgtacaagctagacttgacaattttaggtctggccgctgagtgggttttggcatatatgttgttcacaaaattcttttatttattaggtctttcagctataatgcaggtgttctttggctattttgctagtcatttcatcagcaattcttggctcatgtggtttatcattagtattgtacaaatggcacccgtttctgcaatggttaggatgtacatcttctttgcttctttctactacatatggaagagctatgttcatatcatggatggttgcacctcttcgacttgcatgatgtgctataagcgcaatcgtgccacacgcgttgagtgtacaactattgttaatggcatgaagagatctttctatgtctatgcaaatggaggccgtggcttctgcaagactcacaattggaattgtctcaattgtgacacattttgcactggtagtacattcattagtgatgaagttgctcgtgatttgtcactccagtttaaaagaccaatcaaccctactgaccagtcatcgtatattgttgatagtgttgctgtgaaaaatggcgcgcttcacctctactttgacaaggctggtcaaaagacctatgagagacatccgctctcccattttgtcaatttagacaatttgagagctaacaacactaaaggttcactgcctattaatgtcatagtttttgatggcaagtccaaatgcgacgagtctgcttctaagtctgcttctgtgtactacagtcagctgatgtgccaacctattctgttgcttgaccaagctcttgtatcagacgttggagatagtactgaagtttccgttaagatgtttgatgcttatgtcgacaccttttcagcaacttttagtgttcctatggaaaaacttaaggcacttgttgctacagctcacagcgagttagcaaagggtgtagctttagatggtgtcctttctacattcgtgtcagctgcccgacaaggtgttgttgataccgatgttgacacaaaggatgttattgaatgtctcaaactttcacatcactctgacttagaagtgacaggtgacagttgtaacaatttcatgctcacctataataaggttgaaaacatgacgcccagagatcttggcgcatgtattgactgtaatgcaaggcatatcaatgcccaagtagcaaaaagtcacaatgtttcactcatctggaatgtaaaagactacatgtctttatctgaacagctgcgtaaacaaattcgtagtgctgccaagaagaacaacataccttttagactaacttgtgctacaactagacaggttgtcaatgtcataactactaaaatctcactcaagggtggtaagattgttagtacttgttttaaacttatgcttaaggccacattattgtgcgttcttgctgcattggtttgttatatcgttatgccagtacatacattgtcaatccatgatggttacacaaatgaaatcattggttacaaagccattcaggatggtgtcactcgtgacatcatttctactgatgattgttttgcaaataaacatgctggttttgacgcatggtttagccagcgtggtggttcatacaaaaatgacaaaagctgccctgtagtagctgctatcattacaagagagattggtttcatagtgcctggcttaccgggtactgtgctgagagcaatcaatggtgacttcttgcattttctacctcgtgtttttagtgctgttggcaacatttgctacacaccttccaaactcattgagtatagtgattttgctacctctgcttgcgttcttgctgctgagtgtacaatttttaaggatgctatgggcaaacctgtgccatattgttatgacactaatttgctagagggttctatttcttatagtgagcttcgtccagacactcgttatgtgcttatggatggttccatcatacagtttcctaacacttacctggagggttctgttagagtagtaacaacttttgatgctgagtactgtagacatggtacatgcgaaaggtcagaagtaggtatttgcctatctaccagtggtagatgggttcttaataatgagcattacagagctctatcaggagttttctgtggtgttgatgcgatgaatctcatagctaacatctttactcctcttgtgcaacctgtgggtgctttagatgtgtctgcttcagtagtggctggtggtattattgccatattggtgacttgtgctgcctactactttatgaaattcagacgtgtttttggtgagtacaaccatgttgttgctgctaatgcacttttgtttttgatgtctttcactatactctgtctggtaccagcttacagctttctgccgggagtctactcagtcttttacttgtacttgacattctatttcaccaatgatgtttcattcttggctcaccttcaatggtttgccatgttttctcctattgtgcctttttggataacagcaatctatgtattctgtatttctctgaagcactgccattggttctttaacaactatcttaggaaaagagtcatgtttaatggagttacatttagtaccttcgaggaggctgctttgtgtacctttttgctcaacaaggaaatgtacctaaaattgcgtagcgagacactgttgccacttacacagtataacaggtatcttgctctatataacaagtacaagtatttcagtggagccttagatactaccagctatcgtgaagcagcttgctgccacttagcaaaggctctaaatgactttagcaactcaggtgctgatgttctctaccaaccaccacagacatcaatcacttctgctgttctgcagagtggttttaggaaaatggcattcccgtcaggcaaagttgaagggtgcatggtacaagtaacctgtggaactacaactcttaatggattgtggttggatgacacagtatactgtccaagacatgtcatttgcacagcagaagacatgcttaatcctaactatgaagatctgctcattcgcaaatccaaccatagctttcttgttcaggctggcaatgttcaacttcgtgttattggccattctatgcaaaattgtctgcttaggcttaaagttgatacttctaaccctaagacacccaagtataaatttgtccgtatccaacctggtcaaacattttcagttctagcatgctacaatggttcaccatctggtgtttatcagtgtgccatgagacctaatcataccattaaaggttctttccttaatggatcatgtggtagtgttggttttaacattgattatgattgcgtgtctttctgctatatgcatcatatggagcttccaacaggagtacacgctggtactgacttagaaggtaaattctatggtccatttgttgacagacaaactgcacaggctgcaggtacagacacaaccataacattaaatgttttggcatggctgtatgctgctgttatcaatggtgataggtggtttcttaatagattcaccactactttgaatgactttaaccttgtggcaatgaagtacaactatgaacctttgacacaagatcatgttgacatattgggacctctttctgctcaaacaggaattgccgtcttagatatgtgtgctgctttgaaagagctgctgcagaatggtatgaatggtcgtactatccttggtagcactattttagaagatgagtttacaccatttgatgttgttagacaatgctctggtgttaccttccaaggtaagttcaagaaaattgttaagggcactcatcattggatgcttttaactttcttgacatcactattgattcttgttcaaagtacacagtggtcactgtttttctttgtttacgagaatgctttcttgccatttactcttggtattatggcaattgctgcatgtgctatgctgcttgttaagcataagcacgcattcttgtgcttgtttctgttaccttctcttgcaacagttgcttactttaatatggtctacatgcctgctagctgggtgatgcgtatcatgacatggcttgaattggctgacactagcttgtctggttataggcttaaggattgtgttatgtatgcttcagctttagttttgcttattctcatgacagctcgcactgtttatgatgatgctgctagacgtgtttggacactgatgaatgtcattacacttgtttacaaagtctactatggtaatgctttagatcaagctatttccatgtgggccttagttatttctgtaacctctaactattctggtgtcgttacgactattatgtttttagctagagctatagtgtttgtgtgtgttgagtattacccattgttatttattactggcaacaccttacagtgtatcatgcttgtttattgtttcttaggctattgttgctgctgctactttggccttttctgtttactcaaccgttacttcaggcttactcttggtgtttatgactacttggtctctacacaagaatttaggtatatgaactcccaggggcttttgcctcctaagagtagtattgatgctttcaagcttaacattaagttgttgggtattggaggtaaaccatgtatcaaggttgctactgtacagtctaaaatgtctgacgtaaagtgcacatctgtggtactgctctcggttcttcaacaacttagagtagagtcatcttctaaattgtgggcacaatgtgtacaactccacaatgatattcttcttgcaaaagacacaactgaagctttcgagaagatggtttctcttttgtctgttttgctatccatgcagggtgctgtagacattaataggttgtgcgaggaaatgctcgataaccgtgctactcttcaggctattgcttcagaatttagttctttaccatcatatgccgcttatgccactgcccaggaggcctatgagcaggctgtagctaatggtgattctgaagtcgttctcaaaaagttaaagaaatctttgaatgtggctaaatctgagtttgaccgtgatgctgccatgcaacgcaagttggaaaagatggcagatcaggctatgacccaaatgtacaaacaggcaagatctgaggacaagagggcaaaagtaactagtgctatgcaaacaatgctcttcactatgcttaggaagcttgataatgatgcacttaacaacattatcaacaatgcgcgtgatggttgtgttccactcaacatcataccattgactacagcagccaaactcatggttgttgtccctgattatggtacctacaagaacacttgtgatggtaacacctttacatatgcatctgcactctgggaaatccagcaagttgttgatgcggatagcaagattgttcaacttagtgaaattaacatggacaattcaccaaatttggcttggcctcttattgttacagctctaagagccaactcagctgttaaactacagaataatgaactgagtccagtagcactacgacagatgtcctgtgcggctggtaccacacaaacagcttgtactgatgacaatgcacttgcctactataacaattcgaagggaggtaggtttgtgctggcattactatcagaccaccaagatctcaaatgggctagattccctaagagtgatggtacaggtacaatttacacagaactggaaccaccttgtaggtttgttacagacacaccaaaagggcctaaagtgaaatacttgtacttcatcaaaggcttaaacaacctaaatagaggtatggtgctgggcagtttagctgctacagtacgtcttcaggctggaaatgctacagaagtacctgccaattcaactgtgctttccttctgtgcttttgcagtagaccctgctaaagcatataaggattacctagcaagtggaggacaaccaatcaccaactgtgtgaagatgttgtgtacacacactggtacaggacaggcaattactgtaacaccagaagctaacatggaccaagagtcctttggtggtgcttcatgttgtctgtattgtagatgccacattgaccatccaaatcctaaaggattctgtgacttgaaaggtaagtacgtccaaatacctaccacttgtgctaatgacccagtgggttttacacttagaaacacagtctgtaccgtctgcggaatgtggaaaggttatggctgtagttgtgaccaactccgcgaacccttgatgcagtctgcggatgcatcaacgtttttaaacgggtttgcggtgtaagtgcagcccgtcttacaccgtgcggcacaggcactagtactgatgtcgtctacagggcttttgatatttacaacgaaaaagttgctggttttgcaaagttcctaaaaactaattgctgtcgcttccaggagaaggatgaggaaggcaatttattagactcttactttgtagttaagaggcatactatgtctaactaccaacatgaagagactatttataacttggttaaagattgtccagcggttgctgtccatgactttttcaagtttagagtagatggtgacatggtaccacatatatcacgtcagcgtctaactaaatacacaatggctgatttagtctatgctctacgtcattttgatgagggtaattgtgatacattaaaagaaatactcgtcacatacaattgctgtgatgatgattatttcaataagaaggattggtatgacttcgtagagaatcctgacatcttacgcgtatatgctaacttaggtgagcgtgtacgccaatcattattaaagactgtacaattctgcgatgctatgcgtgatgcaggcattgtaggcgtactgacattagataatcaggatcttaatgggaactggtacgatttcggtgatttcgtacaagtagcaccaggctgcggagttcctattgtggattcatattactcattgctgatgcccatcctcactttgactagggcattggctgctgagtcccatatggatgctgatctcgcaaaaccacttattaagtgggatttgctgaaatatgattttacggaagagagactttgtctcttcgaccgttattttaaatattgggaccagacataccatcccaattgtattaactgtttggatgataggtgtatccttcattgtgcaaactttaatgtgttattttctactgtgtttccacctacaagttttggaccactagtaagaaaaatatttgtagatggtgttccttttgttgtttcaactggataccattttcgtgagttaggagtcgtacataatcaggatgtaaacttacatagctcgcgtctcagtttcaaggaacttttagtgtatgctgctgatccagctatgcatgcagcttctggcaatttattgctagataaacgcactacatgcttttcagtagctgcactaacaaacaatgttgcttttcaaactgtcaaacccggtaattttaataaagacttttatgactttgctgtgtctaaaggtttctttaaggaaggaagttctgttgaactaaaacacttcttctttgctcaggatggcaacgctgctatcagtgattatgactattatcgttataatctgccaacaatgtgtgatatcagacaactcctattcgtagttgaagttgttgataaatactttgattgttacgatggtggctgtattaatgccaaccaagtaatcgttaacaatctggataaatcagctggtttcccatttaataaatggggtaaggctagactttattatgactcaatgagttatgaggatcaagatgcacttttcgcgtatactaagcgtaatgtcatccctactataactcaaatgaatcttaagtatgccattagtgcaaagaatagagctcgcaccgtagctggtgtctctatctgtagtactatgacaaatagacagtttcatcagaaattattgaagtcaatagccgccactagaggagctactgtggtaattggaacaagcaagttttacggtggctggcataatatgttaaaaactgtttacagtgatgtagaaactccacaccttatgggttgggattatccaaaatgtgacagagccatgcctaacatgcttaggataatggcctctcttgttcttgctcgcaaacataacacttgctgtaacttatcacaccgtttctacaggttagctaacgagtgtgcgcaagtattaagtgagatggtcatgtgtggcggctcactatatgttaaaccaggtggaacatcatccggtgatgctacaactgcttatgctaatagtgtctttaacatttgtcaagctgttacagccaatgtaaatgcacttctttcaactgatggtaataagatagctgacaagtatgtccgcaatctacaacacaggctctatgagtgtctctatagaaatagggatgttgatcatgaattcgtggatgagttttacgcttacctgcgtaaacatttctccatgatgattctttctgatgatgccgttgtgtgctataacagtaactatgcggctcaaggtttagtagctagcattaagaactttaaggcagttctttattatcaaaataatgtgttcatgtctgaggcaaaatgttggactgagactgaccttactaaaggacctcacgaattttgctcacagcatacaatgctagttaaacaaggagatgattacgtgtacctgccttacccagatccatcaagaatattaggcgcaggctgttttgtcgatgatattgtcaaaacagatggtacacttatgattgaaaggttcgtgtcactggctattgatgcttacccacttacaaaacatcctaatcaggagtatgctgatgtctttcacttgtatttacaatacattagaaagttacatgatgagcttactggccacatgttggacatgtattccgtaatgctaactaatgataacacctcacggtactgggaacctgagttttatgaggctatgtacacaccacatacagtcttgcaggctgtaggtgcttgtgtattgtgcaattcacagacttcacttcgttgcggtgcctgtattaggagaccattcctatgttgcaagtgctgctatgaccatgtcatttcaacatcacacaaattagtgttgtctgttaatccctatgtttgcaatgccccaggttgtgatgtcactgatgtgacacaactgtatctaggaggtatgagctattattgcaagtcacataagcctcccattagttttccattatgtgctaatggtcaggtttttggtttatacaaaaacacatgtgtaggcagtgacaatgtcactgacttcaatgcgatagcaacatgtgattggactaatgctggcgattacatacttgccaacacttgtactgagagactcaagcttttcgcagcagaaacgctcaaagccactgaggaaacatttaagctgtcatatggtattgccactgtacgcgaagtactctctgacagagaattgcatctttcatgggaggttggaaaacctagaccaccattgaacagaaactatgtctttactggttaccgtgtaactaaaaatagtaaagtacagattggagagtacacctttgaaaaaggtgactatggtgatgctgttgtgtacagaggtactacgacatacaagttgaatgttggtgattactttgtgttgacatctcacactgtaatgccacttagtgcacctactctagtgccacaagagcactatgtgagaattactggcttgtacccaacactcaacatctcagatgagttttctagcaatgttgcaaattatcaaaaggtcggcatgcaaaagtactctacactccaaggaccacctggtactggtaagagtcattttgccatcggacttgctctctattacccatctgctcgcatagtgtatacggcatgctctcatgcagctgttgatgccctatgtgaaaaggcattaaaatatttgcccatagataaatgtagtagaatcatacctgcgcgtgcgcgcgtagagtgttttgataaattcaaagtgaattcaacactagaacagtatgttttctgcactgtaaatgcattgccagaaacaactgctgacattgtagtctttgatgaaatctctatggctactaattatgacttgagtgttgtcaatgctagacttcgtgcaaaacactacgtctatattggcgatcctgctcaattaccagccccccgcacattgctgactaaaggcacactagaaccagaatattttaattcagtgtgcagacttatgaaaacaataggtccagacatgttccttggaacttgtcgccgttgtcctgctgaaattgttgacactgtgagtgctttagtttatgacaataagctaaaagcacacaaggataagtcagctcaatgcttcaaaatgttctacaaaggtgttattacacatgatgtttcatctgcaatcaacagacctcaaataggcgttgtaagagaatttcttacacgcaatcctgcttggagaaaagctgtttttatctcaccttataattcacagaacgctgtagcttcaaaaatcttaggattgcctacgcagactgttgattcatcacagggttctgaatatgactatgtcatattcacacaaactactgaaacagcacactcttgtaatgtcaaccgcttcaatgtggctatcacaagggcaaaaattggcattttgtgcataatgtctgatagagatctttatgacaaactgcaatttacaagtctagaaataccacgtcgcaatgtggctacattacaagcagaaaatgtaactggactttttaaggactgtagtaagatcattactggtcttcatcctacacaggcacctacacacctcagcgttgatataaagttcaagactgaaggattatgtgttgacataccaggcataccaaaggacatgacctaccgtagactcatctctatgatgggtttcaaaatgaattaccaagtcaatggttaccctaatatgtttatcacccgcgaagaagctattcgtcacgttcgtgcgtggattggctttgatgtagagggctgtcatgcaactagagatgctgtgggtactaacctacctctccagctaggattttctacaggtgttaacttagtagctgtaccgactggttatgttgacactgaaaataacacagaattcaccagagttaatgcaaaacctccaccaggtgaccagtttaaacatcttataccactcatgtataaaggcttgccctggaatgtagtgcgtattaagatagtacaaatgctcagtgatacactgaaaggattgtcagacagagtcgtgttcgtcctttgggcgcatggctttgagcttacatcaatgaagtactttgtcaagattggacctgaaagaacgtgttgtctgtgtgacaaacgtgcaacttgcttttctacttcatcagatacttatgcctgctggaatcattctgtgggttttgactatgtctataacccatttatgattgatgttcagcagtggggctttacgggtaaccttcagagtaaccatgaccaacattgccaggtacatggaaatgcacatgtggctagttgtgatgctatcatgactagatgtttagcagtccatgagtgctttgttaagcgcgttgattggtctgttgaataccctattataggagatgaactgagggttaattctgcttgcagaaaagtacaacacatggttgtgaagtctgcattgcttgctgataagtttccagttcttcatgacataggaaatccaaaggctatcaagtgtgtgcctcaggctgaagtagaatggaagttctacgatgctcagccatgtagtgacaaagcttacaaaatagaggaactcttctattcttatgctatacatcacgataaattcactgatggtgtttgtttgttttggaattgtaacgttgatcgttacccagccaatgcaattgtgtgtaggtttgacacaagagtcttgtcaaacttgaacttaccaggctgtgatggtggtagtttgtatgtgaataagcatgcattccacactccagctttcgataaaagtgcatttactaatttaaagcaattgcctttcttttactattctgatagtccttgtgagtctcatggcaaacaagtagtgtcggatattgattatgttccactcaaatctgctacgtgtattacacgatgcaatttaggtggtgctgtttgcagacaccatgcaaatgagtaccgacagtacttggatgcatataatatgatgatttctgctggatttagcctatggatttacaaacaatttgatacttataacctgtggaatacatttaccaggttacagagtttagaaaatgtggcttataatgttgttaataaaggacactttgatggacacgccggcgaagcacctgtttccatcattaataatgctgtttacacaaaggtagatggtattgatgtggagatctttgaaaataagacaacacttcctgttaatgttgcatttgagctttgggctaagcgtaacattaaaccagtgccagagattaagatactcaataatttgggtgttgatatcgctgctaatactgtaatctgggactacaaaagagaagccccagcacatgtatctacaataggtgtctgcacaatgactgacattgccaagaaacctactgagagtgcttgttcttcacttactgtcttgtttgatggtagagtggaaggacaggtagacctttttagaaacgcccgtaatggtgttttaataacagaaggttcagtcaaaggtctaacaccttcaaagggaccagcacaagctagcgtcaatggagtcacattaattggagaatcagtaaaaacacagtttaactactttaagaaagtagacggcattattcaacagttgcctgaaacctactttactcagagcagagacttagaggattttaagcccagatcacaaatggaaactgactttctcgagctcgctatggatgaattcatacagcgatataagctcgagggctatgccttcgaacacatcgtttatggagatttcagtcatggacaacttggcggtcttcatttaatgataggcttagccaagcgctcacaagattcaccacttaaattagaggattttatccctatggacagcacagtgaaaaattacttcataacagatgcgcaaacaggttcatcaaaatgtgtgtgttctgtgattgatcttttacttgatgactttgtcgagataataaagtcacaagatttgtcagtgatttcaaaagtggtcaaggttacaattgactatgctgaaatttcattcatgctttggtgtaaggatggacatgttgaaaccttctacccaaaactacaagcaagtcaagcgtggcaaccaggtgttgcgatgcctaacttgtacaagatgcaaagaatgcttcttgaaaagtgtgaccttcagaattatggtgaaaatgctgttataccaaaaggaataatgatgaatgtcgcaaagtatactcaactgtgtcaatacttaaatacacttactttagctgtaccctacaacatgagagttattcactttggtgctggctctgataaaggagttgcaccaggtacagctgtgctcagacaatggttgccaactggcacactacttgtcgattcagatcttaatgacttcgtctccgacgcagattctactttaattggagactgtgcaacagtacatacggctaataaatgggaccttattattagcgatatgtatgaccctaggaccaaacatgtgacaaaagagaatgactctaaagaagggtttttcacttatctgtgtggatttataaagcaaaaactagccctgggtggttctatagctgtaaagataacagagcattcttggaatgctgacctttacaagcttatgggccatttctcatggtggacagcttttgttacaaatgtaaatgcatcatcatcggaagcatttttaattggggctaactatcttggcaagccgaaggaacaaattgatggctataccatgcatgctaactacattttctggaggaacacaaatcctatccagttgtcttcctattcactctttgacatgagcaaatttcctcttaaattaagaggaactgctgtaatgtctcttaaggagaatcaaatcaatgatatgatttattctcttctggaaaaaggtaggcttatcattagagaaaacaacagagttgtggtttcaagtgatattcttgttaacaactaaacgaacatgtttattttcttattatttcttactctcactagtggtagtgaccttgaccggtgcaccacttttgatgatgttcaagctcctaattacactcaacatacttcatctatgaggggggtttactatcctgatgaaatttttagatcagacactctttatttaactcaggatttatttcttccattttattctaatgttacagggtttcatactattaatcatacgtttggcaaccctgtcataccttttaaggatggtatttattttgctgccacagagaaatcaaatgttgtccgtggttgggtttttggttctaccatgaacaacaagtcacagtcggtgattattattaacaattctactaatgttgttatacgagcatgtaactttgaattgtgtgacaaccctttctttgctgtttctaaacccatgggtacacagacacatactatgatattcgataatgcatttaattgcactttcgagtacatatctgatgccttttcgcttgatgtttcagaaaagtcaggtaattttaaacacttacgagagtttgtgtttaaaaataaagatgggtttctctatgtttataagggctatcaacctatagatgtagttcgtgatctaccttctggttttaacactttgaaacctatttttaagttgcctcttggtattaacattacaaattttagagccattcttacagccttttcacctgctcaagacatttggggcacgtcagctgcagcctattttgttggctatttaaagccaactacatttatgctcaagtatgatgaaaatggtacaatcacagatgctgttgattgttctcaaaatccacttgctgaactcaaatgctctgttaagagctttgagattgacaaaggaatttaccagacctctaatttcagggttgttccctcaggagatgttgtgagattccctaatattacaaacttgtgtccttttggagaggtttttaatgctactaaattcccttctgtctatgcatgggagagaaaaaaaatttctaattgtgttgctgattactctgtgctctacaactcaacatttttttcaacctttaagtgctatggcgtttctgccactaagttgaatgatctttgcttctccaatgtctatgcagattcttttgtagtcaagggagatgatgtaagacaaatagcgccaggacaaactggtgttattgctgattataattataaattgccagatgatttcatgggttgtgtccttgcttggaatactaggaacattgatgctacttcaactggtaattataattataaatataggtatcttagacatggcaagcttaggccctttgagagagacatatctaatgtgcctttctcccctgatggcaaaccttgcaccccacctgctcttaattgttattggccattaaatgattatggtttttacaccactactggcattggctaccaaccttacagagttgtagtactttcttttgaacttttaaatgcaccggccacggtttgtggaccaaaattatccactgaccttattaagaaccagtgtgtcaattttaattttaatggactcactggtactggtgtgttaactccttcttcaaagagatttcaaccatttcaacaatttggccgtgatgtttctgatttcactgattccgttcgagatcctaaaacatctgaaatattagacatttcaccttgctcttttgggggtgtaagtgtaattacacctggaacaaatgcttcatctgaagttgctgttctatatcaagatgttaactgcactgatgtttctacagcaattcatgcagatcaactcacaccagcttggcgcatatattctactggaaacaatgtattccagactcaagcaggctgtcttataggagctgagcatgtcgacacttcttatgagtgcgacattcctattggagctggcatttgtgctagttaccatacagtttctttattacgtagtactagccaaaaatctattgtggcttatactatgtctttaggtgctgatagttcaattgcttactctaataacaccattgctatacctactaacttttcaattagcattactacagaagtaatgcctgtttctatggctaaaacctccgtagattgtaatatgtacatctgcggagattctactgaatgtgctaatttgcttctccaatatggtagcttttgcacacaactaaatcgtgcactctcaggtattgctgctgaacaggatcgcaacacacgtgaagtgttcgctcaagtcaaacaaatgtacaaaaccccaactttgaaatattttggtggttttaatttttcacaaatattacctgaccctctaaagccaactaagaggtcttttattgaggacttgctctttaataaggtgacactcgctgatgctggcttcatgaagcaatatggcgaatgcctaggtgatattaatgctagagatctcatttgtgcgcagaagttcaatggacttacagtgttgccacctctgctcactgatgatatgattgctgcctacactgctgctctagttagtggtactgccactgctggatggacatttggtgctggcgctgctcttcaaataccttttgctatgcaaatggcatataggttcaatggcattggagttacccaaaatgttctctatgagaaccaaaaacaaatcgccaaccaatttaacaaggcgattagtcaaattcaagaatcacttacaacaacatcaactgcattgggcaagctgcaagacgttgttaaccagaatgctcaagcattaaacacacttgttaaacaacttagctctaattttggtgcaatttcaagtgtgctaaatgatatcctttcgcgacttgataaagtcgaggcggaggtacaaattgacaggttaattacaggcagacttcaaagccttcaaacctatgtaacacaacaactaatcagggctgctgaaatcagggcttctgctaatcttgctgctactaaaatgtctgagtgtgttcttggacaatcaaaaagagttgacttttgtggaaagggctaccaccttatgtccttcccacaagcagccccgcatggtgttgtcttcctacatgtcacgtatgtgccatcccaggagaggaacttcaccacagcgccagcaatttgtcatgaaggcaaagcatacttccctcgtgaaggtgtttttgtgtttaatggcacttcttggtttattacacagaggaacttcttttctccacaaataattactacagacaatacatttgtctcaggaaattgtgatgtcgttattggcatcattaacaacacagtttatgatcctctgcaacctgagcttgactcattcaaagaagagctggacaagtacttcaaaaatcatacatcaccagatgttgattttggcgacatttcaggcattaacgcttctgtcgtcaacattcaaaaagaaattgaccgcctcaatgaggtcgctaaaaatttaaatgaatcactcattgaccttcaagaattgggaaaatatgagcaatatattaaatggccttggtatgtttggctcggcttcattgctggactaattgccatcgtcatggttacaatcttgctttgttgcatgactagttgttgcagttgcctcaagggtgcatgctcttgtggttcttgctgcaagtttgatgaggatgactctgagccagttctcaagggtgtcaaattacattacacataaacgaacttatggatttgtttatgagattttttactcttggatcaattactgcacagccagtaaaaattgacaatgcttctcctgcaagtactgttcatgctacagcaacgataccgctacaagcctcactccctttcggatggcttgttattggcgttgcatttcttgctgtttttcagagcgctaccaaaataattgcgctcaataaaagatggcagctagccctttataagggcttccagttcatttgcaatttactgctgctatttgttaccatctattcacatcttttgcttgtcgctgcaggtatggaggcgcaatttttgtacctctatgccttgatatattttctacaatgcatcaacgcatgtagaattattatgagatgttggctttgttggaagtgcaaatccaagaacccattactttatgatgccaactactttgtttgctggcacacacataactatgactactgtataccatataacagtgtcacagatacaattgtcgttactgaaggtgacggcatttcaacaccaaaactcaaagaagactaccaaattggtggttattctgaggataggcactcaggtgttaaagactatgtcgttgtacatggctatttcaccgaagtttactaccagcttgagtctacacaaattactacagacactggtattgaaaatgctacattcttcatctttaacaagcttgttaaagacccaccgaatgtgcaaatacacacaatcgacggctcttcaggagttgctaatccagcaatggatccaatttatgatgagccgacgacgactactagcgtgcctttgtaagcacaagaaagtgagtacgaacttatgtactcattcgtttcggaagaaacaggtacgttaatagttaatagcgtacttctttttcttgctttcgtggtattcttgctagtcacactagccatccttactgcgcttcgattgtgtgcgtactgctgcaatattgttaacgtgagtttagtaaaaccaacggtttacgtctactcgcgtgttaaaaatctgaactcttctgaaggagttcctgatcttctggtctaaacgaactaactattattattattctgtttggaactttaacattgcttatcatggcagacaacggtactattaccgttgaggagcttaaacaactcctggaacaatggaacctagtaataggtttcctattcctagcctggattatgttactacaatttgcctattctaatcggaacaggtttttgtacataataaagcttgttttcctctggctcttgtggccagtaacacttgcttgttttgtgcttgctgttgtctacagaattaattgggtgactggcgggattgcgattgcaatggcttgtattgtaggcttgatgtggcttagctacttcgttgcttccttcaggctgtttgctcgtacccgctcaatgtggtcattcaacccagaaacaaacattcttctcaatgtgcctctccgggggacaattgtgaccagaccgctcatggaaagtgaacttgtcattggtgctgtgatcattcgtggtcacttgcgaatggccggacactccctagggcgctgtgacattaaggacctgccaaaagagatcactgtggctacatcacgaacgctttcttattacaaattaggagcgtcgcagcgtgtaggcactgattcaggttttgctgcatacaaccgctaccgtattggaaactataaattaaatacagaccacgccggtagcaacgacaatattgctttgctagtacagtaagtgacaacagatgtttcatcttgttgacttccaggttacaatagcagagatattgattatcattatgaggactttcaggattgctatttggaatcttgacgttataataagttcaatagtgagacaattatttaagcctctaactaagaagaattattcggagttagatgatgaagaacctatggagttagattatccataaaacgaacatgaaaattattctcttcctgacattgattgtatttacatcttgcgagctatatcactatcaggagtgtgttagaggtacgactgtactactaaaagaaccttgcccatcaggaacatacgagggcaattcaccatttcaccctcttgctgacaataaatttgcactaacttgcactagcacacactttgcttttgcttgtgctgacggtactcgacatacctatcagctgcgtgcaagatcagtttcaccaaaacttttcatcagacaagaggaggttcaacaagagctctactcgccactttttctcattgttgctgctctagtatttttaatactttgcttcaccattaagagaaagacagaatgaatgagctcactttaattgacttctatttgtgctttttagcctttctgctattccttgttttaataatgcttattatattttggttttcactcgaaatccaggatctagaagaaccttgtaccaaagtctaaacgaacatgaaacttctcattgttttgacttgtatttctctatgcagttgcatatgcactgtagtacagcgctgtgcatctaataaacctcatgtgcttgaagatccttgtaaggtacaacactaggggtaatacttatagcactgcttggctttgtgctctaggaaaggttttaccttttcatagatggcacactatggttcaaacatgcacacctaatgttactatcaactgtcaagatccagctggtggtgcgcttatagctaggtgttggtaccttcatgaaggtcaccaaactgctgcatttagagacgtacttgttgttttaaataaacgaacaaattaaaatgtctgataatggaccccaatcaaaccaacgtagtgccccccgcattacatttggtggacccacagattcaactgacaataaccagaatggaggacgcaatggggcaaggccaaaacagcgccgaccccaaggtttacccaataatattgcgtcttggttcacagctctcactcagcatggcaaggaggaacttagattccctcgaggccagggcgttccaatcaacaccaatagtggtccagatgaccaaattggctactaccgaagagctacccgacgagttcgtggtggtgacggcaaaatgaaagagctcagccccagatggtacttctattacctaggaactggcccagaagcttcacttccctacggcgctaacaaagaaggcatcgtatgggttgcaactgagggagccttgaatacacccaaagaccacattggcacccgcaatcctaataacaatgctgccaccgtgctacaacttcctcaaggaacaacattgccaaaaggcttctacgcagagggaagcagaggcggcagtcaagcctcttctcgctcctcatcacgtagtcgcggtaattcaagaaattcaactcctggcagcagtaggggaaattctcctgctcgaatggctagcggaggtggtgaaactgccctcgcgctattgctgctagacagattgaaccagcttgagagcaaagtttctggtaaaggccaacaacaacaaggccaaactgtcactaagaaatctgctgctgaggcatctaaaaagcctcgccaaaaacgtactgccacaaaacagtacaacgtcactcaagcatttgggagacgtggtccagaacaaacccaaggaaatttcggggaccaagacctaatcagacaaggaactgattacaaacattggccgcaaattgcacaatttgctccaagtgcctctgcattctttggaatgtcacgcattggcatggaagtcacaccttcgggaacatggctgacttatcatggagccattaaattggatgacaaagatccacaattcaaagacaacgtcatactgctgaacaagcacattgacgcatacaaaacattcccaccaacagagcctaaaaaggacaaaaagaaaaagactgatgaagctcagcctttgccgcagagacaaaagaagcagcccactgtgactcttcttcctgcggctgacatggatgatttctccagacaacttcaaaattccatgagtggagcttctgctgattcaactcaggcataaacactcatgatgaccacacaaggcagatgggctatgtaaacgttttcgcaattccgtttacgatacatagtctactcttgtgcagaatgaattctcgtaactaaacagcacaagtaggtttagttaactttaatctcacatagcaatctttaatcaatgtgtaacattagggaggacttgaaagagccaccacattttcatcgaggccacgcggagtacgatcgagggtacagtgaataatgctagggagagctgcctatatggaagagccctaatgtgtaaaattaattttagtagtgctatccccatgtgattttaatagcttcttaggagaatgacaaaaaaaaaaaaa

SEQ ID NO: 29800 - DNA, 29754 bp, SARS Coronavirus
atattaggtttttacctacccaggaaaagccaaccaacctcgatctcttgtagatctgttctctaaacgaactttaaaatctgtgtagctgtcgctcggctgcatgcctagtgcacctacgcagtataaacaataataaattttactgtcgttgacaagaaacgagtaactcgtccctcttctgcagactgcttacggtttcgtccgtgttgcagtcgatcatcagcatacctaggtttcgtccgggtgtgaccgaaaggtaagatggagagccttgttcttggtgtcaacgagaaaacacacgtccaactcagtttgcctgtccttcaggttagagacgtgctagtgcgtggcttcggggactctgtggaagaggccctatcggaggcacgtgaacacctcaaaaatggcacttgtggtctagtagagctggaaaaaggcgtactgccccagcttgaacagccctatgtgttcattaaacgttctgatgccttaagcaccaatcacggccacaaggtcgttgagctggttgcagaaatggacggcattcagtacggtcgtagcggtataacactgggagtactcgtgccacatgtgggcgaaaccccaattgcataccgcaatgttcttcttcgtaagaacggtaataagggagccggtggtcatagctatggcatcgatctaaagtcttatgacttaggtgacgagcttggcactgatcccattgaagattatgaacaaaactggaacactaagcatggcagtggtgcactccgtgaactcactcgtgagctcaatggaggtgcagtcactcgctatgtcgacaacaatttctgtggcccagatgggtaccctcttgattgcatcaaagattttctcgcacgcgcgggcaagtcaatgtgcactctttccgaacaacttgattacatcgagtcgaagagaggtgtctactgctgccgtgaccatgagcatgaaattgcctggttcactgagcgctctgataagagctacgagcaccagacacccttcgaaattaagagtgccaagaaatttgacactttcaaaggggaatgcccaaagtttgtgtttcctcttaactcaaaagtcaaagtcattcaaccacgtgttgaaaagaaaaagactgagggtttcatggggcgtatacgctctgtgtaccctgttgcatctccacaggagtgtaacaatatgcacttgtctaccttgatgaaatgtaatcattgcgatgaagtttcatggcagacgtgcgactttctgaaagccacttgtgaacattgtggcactgaaaatttagttattgaaggacctactacatgtgggtacctacctactaatgctgtagtgaaaatgccatgtcctgcctgtcaagacccagagattggacctgagcatagtgttgcagattatcacaaccactcaaacattgaaactcgactccgcaagggaggtaggactagatgttttggaggctgtgtgtttgcctatgttggctgctataataagcgtgcctactgggttcctcgtgctagtgctgatattggctcaggccatactggcattactggtgacaatgtggagaccttgaatgaggatctccttgagatactgagtcgtgaacgtgttaacattaacattgttggcgattttcatttgaatgaagaggttgccatcattttggcatctttctctgcttctacaagtgcctttattgacactataaagagtcttgattacaagtctttcaaaaccattgttgagtcctgcggtaactataaagttaccaagggaaagcccgtaaaaggtgcttggaacattggacaacagagatcagttttaacaccactgtgtggttttccctcacaggctgctggtgttatcagatcaatttttgcgcgcacacttgatgcagcaaaccactcaattcctgatttgcaaagagcagctgtcaccatacttgatggtatttctgaacagtcattacgtcttgtcgacgccacggtttatacttcagacctgctcaccaacagtgtcattattatggcatatgtaactggtggtcttgtacaacagacttctcagtggttgtctaatcttttgggcactactgttgaaaaactcaggcctatctttgaatggattgaggcgaaacttagtgcaggagttgaatttctcaaggatgcttgggagattctcaaatttctcattacaggtgtttttgacatcgtcaagggtcaaatacaggttgcttcagataacatcaaggattgtgtaaaatgcttcattgatgttgttaacaaggcactcgaaatgtgcattgatcaagtcactatcgctggcgcaaagttgcgatcactcaacttaggtgaagtcttcatcgctcaaagcaagggactttaccgtcagtgtatacgtggcaaggagcagctgcaactactcatgcctcttaaggcaccaaaagaagtaacctttcttgaaggtgattcacatgacacagtacttacctctgaggaggttgttctcaagaacggtgaactcgaagcactcgagacgcccgttgatagcttcacaaatggagctatcgttggcacaccagtctgtgtaaatggcctcatgctcttagagattaaggacaaagaacaatactgcgcattgtctcctggtttactggctacaaacaatgtctttcgcttaaaagggggtgcaccaattaaaggtgtaacctttggagaagatactgtttgggaagttcaaggttacaagaatgtgagaatcacatttgagcttgatgaacgtgttgacaaagtgcttaatgaaaagtgctctgtctacactgttgaatccggtaccgaagttactgagtttacatgtgttgtagcagaggctgttgtgaagactttacaaccagtttctgatctccttaccaacatgggtattgatcttgatgagtggagtgtagctacattctacttatttgatgatgctggtgaagaaaacttttcatcacgtatgtattgttccttttaccctccagatgaggaagaagaggacgatgcagagtgtgaggaagaagaaattgatgaaacctgtgaacatgagtacggtacagaggatgattatcaaggtctccctctggaatttggtgcctcagctgaaacagttcgagttgaggaagaagaagaggaagactggctggatgatactactgagcaatcagagattgagccagaaccagaacctacacctgaagaaccagttaatcagtttactggttatttaaaacttactgacaatgttgccattaaatgtgttgacatcgttaaggaggcacaaagtgctaatcctatggtgattgtaaatgctgctaacatacacctgaaacatggtggtggtgtagcaggtgcactcaacaaggcaaccaatggtgccatgcaaaaggagagtgatgattacattaagctaaatggccctcttacagtaggagggtcttgtttgctttctggacataatcttgctaagaagtgtctgcatgttgttggacctaacctaaatgcaggtgaggacatccagcttcttaaggcagcatatgaaaatttcaattcacaggacatcttacttgcaccattgttgtcagcaggcatatttggtgctaaaccacttcagtctttacaagtgtgcgtgcagacggttcgtacacaggtttatattgcagtcaatgacaaagctctttatgagcaggttgtcatggattatcttgataacctgaagcctagagtggaagcacctaaacaagaggagccaccaaacacagaagattccaaaactgaggagaaatccgtcgtacagaagcctgtcgatgtgaagccaaaaattaaggcctgcattgatgaggttaccacaacactggaagaaactaagtttcttaccaataagttactcttgtttgctgatatcaatggtaagctttaccatgattctcagaacatgcttagaggtgaagatatgtctttccttgagaaggatgcaccttacatggtaggtgatgttatcactagtggtgatatcacttgtgttgtaataccctccaaaaaggctggtggcactactgagatgctctcaagagctttgaagaaagtgccagttgatgagtatataaccacgtaccctggacaaggatgtgctggttatacacttgaggaagctaagactgctcttaagaaatgcaaatctgcattttatgtactaccttcagaagcacctaatgctaaggaagagattctaggaactgtatcctggaatttgagagaaatgcttgctcatgctgaagagacaagaaaattaatgcctatatgcatggatgttagagccataatggcaaccatccaacgtaagtataaaggaattaaaattcaagagggcatcgttgactatggtgtccgattcttcttttatactagtaaagagcctgtagcttctattattacgaagctgaactctctaaatgagccgcttgtcacaatgccaattggttatgtgacacatggttttaatcttgaagaggctgcgcgctgtatgcgttctcttaaagctcctgccgtagtgtcagtatcatcaccagatgctgttactacatataatggatacctcacttcgtcatcaaagacatctgaggagcactttgtagaaacagtttctttggctggctcttacagagattggtcctattcaggacagcgtacagagttaggtgttgaatttcttaagcgtggtgacaaaattgtgtaccacactctggagagccccgtcgagtttcatcttgacggtgaggttctttcacttgacaaactaaagagtctcttatccctgcgggaggttaagactataaaagtgttcacaactgtggacaacactaatctccacacacagcttgtggatatgtctatgacatatggacagcagtttggtccaacatacttggatggtgctgatgttacaaaaattaaacctcatgtaaatcatgagggtaagactttctttgtactacctagtgatgacacactacgtagtgaagctttcgagtactaccatactcttgatgagagttttcttggtaggtacatgtctgctttaaaccacacaaagaaatggaaatttcctcaagttggtggtttaacttcaattaaatgggctgataacaattgttatttgtctagtgttttattagcacttcaacagcttgaagtcaaattcaatgcaccagcacttcaagaggcttattatagagcccgtgctggtgatgctgctaacttttgtgcactcatactcgcttacagtaataaaactgttggcgagcttggtgatgtcagagaaactatgacccatcttctacagcatgctaatttggaatctgcaaagcgagttcttaatgtggtgtgtaaatattgtggtcagaaaactactaccttaacgggtgtagaagctgtgatgtatatgggtactctatcttatgataatcttaagacaggtgtttccattccatgtgtgtgtggtcgtgatgctacacaatatctagtacaacaagagtcttcttttgttatgatgtctgcaccacctgctgagtataaattacagcaaggtacattcttatgtgcgaatgagtacactggtaactatcagtgtggtcattacactcatataactgctaaggagaccctctatcgtattgacggagctcaccttacaaagatgtcagagtacaaaggaccagtgactgatgttttctacaaggaaacatcttacactacaaccatcaagcctgtgtcgtataaactcgatggagttacttacacagagattgaaccaaaattggatgggtattataaaaaggataatgcttactatacagagcagcctatagaccttgtaccaactcaaccattaccaaatgcgagttttgataatttcaaactcacatgttctaacacaaaatttgctgatgatttaaatcaaatgacaggcttcacaaagccagcttcacgagagctatctgtcacattcttcccagacttgaatggcgatgtagtggctattgactatagacactattcagcgagtttcaagaaaggtgctaaattactgcataagccaattgtttggcacattaaccaggctacaaccaagacaacgttcaaaccaaacacttggtgtttacgttgtctttggagtacaaagccagtagatacttcaaattcatttgaagttctggcagtagaagacacacaaggaatggacaatcttgcttgtgaaagtcaacaacccacctctgaagaagtagtggaaaatcctaccatacagaaggaagtcatagagtgtgacgtgaaaactaccgaagttgtaggcaatgtcatacttaaaccatcagatgaaggtgttaaagtaacacaagagttaggtcatgaggatcttatggctgcttatgtggaaaacacaagcattaccattaagaaacctaatgagctttcactagccttaggtttaaaaacaattgccactcatggtattgctgcaattaatagtgttccttggagtaaaattttggcttatgtcaaaccattcttaggacaagcagcaattacaacatcaaattgcgctaagagattagcacaacgtgtgtttaacaattatatgccttatgtgtttacattattgttccaattgtgtacttttactaaaagtaccaattctggaattagagcttcactacctacaactattgctaaaaatagtgttaagagtgttgctaaattatgtttggatgccggcattaattatgtgaagtcacccaaattttctaaattgttcacaatcgctatgtggctattgttgttaagtatttgcttaggttctctaatctgtgtaactgctgcttttggtgtactcttatctaattttggtgctccttcttattgtaatggcgttagagaattgtatcttaattcgtctaacgttactactatggatttctgtgaaggttcttttccttgcagcatttgtttaagtggattagactcccttgattcttatccagctcttgaaaccattcaggtgacgatttcatcgtacaagctagacttgacaattttaggtctggccgctgagtgggttttggcatatatgttgttcacaaaattcttttatttattaggtctttcagctataatgcaggtgttctttggctattttgctagtcatttcatcagcaattcttggctcatgtggtttatcattagtattgtacaaatggcacccgtttctgcaatggttaggatgtaaatcttctttgcttctttctactacatatggaagagctatgttcatatcatggatggttgcacctcttcgacttgcatgatgtgctataagcgcaatcgtgccacacgcgttgagtgtacaactattgttaatggcatgaagagatctttctatgtctatgcaaatggaggccgtggcttctgcaagactcacaattggaattgtctcaattgtgacacattttgcactggtagtacattcattagtgatgaagttgctcgtgatttgtcactccagtttaaaagaccaatcaaccctactgaccagtcatcgtatattgttgatagtgttgctgtgaaaaatggcgcgcttcacctctactttgacaaggctggtcaaaagacctatgagagacatccgctctcccattttgtcaatttagacaatttgggagctaacaacactaaaggttcactgcctattaatgtcatagtttttgatggcaagtccaaatgcgacgagtctgcttctaagtctgcttctgtgtactacagtcagctgatgtgccaacctattctgttgcttgaccaagctcttgtatcagacgttggagatagtactgaagtttccgttaagatgtttgatgcttatgtcgacaccttttcagcaacttttagtgttcctatggaaaaacttaaggcacttgttgctacagctcacagcgagttagcaaagggtgtagctttagatggtgtcctttctacatttgtgtcagctgcccgacaaggtgttgttgataccgatgttgacacaaaggatgttattgaatgtctcaaactttcacatcactctgacttagaagtgacaggtgacagttgtaacaatttcatgctcacctataataaggttgaaaacatgacgcccagagatcttggcgcatgtattgactgtaatgcaaggcatatcaatgcccaagtagcaaaaagtcacaatgtttcactcatctggaatgtaaaagactacatgtctttatctgaacagctgcgtaaacaaattcgtagtgctgccaagaagaacaacataccttttagactaacttgtgctacaactagacaggttgtcaatgtcataactactaaaatctcactcaagggtggtaagattgttagtacttgttttaaacttatgcttaaggccacattattgtgcgttcttgctgcattggtttgttatatcgttatgccagtacatacattgtcaatccgtgatggttacacaaatgaaatcattggttacaaagccattcaggatggtgtcactcgtgacatcatttctactgatgattgttttgcaaataaacatgctggttttgacgcatggtttagccagcgtggtggttcatacaaaaatgacaaaagctgccctgtagtagctgctatcattacaagagagattggtttcatagtgcctggcttaccgggtactgtgctgagagcaatcaatggtgacttcttgcattttctacctcgtgtttttagtgctgttggcaacatttgctacacaccttccaaactcattgagtatagtgattttgctacctctgcttgcgttcttgctgctgagtgtacaatttttaaggatgctatgggcaaacctgtgccatattgttatgacactaatttgctagagggttctatttcttatagtgagcttcgtccagacactcgttatgtgcttatggatggttccatcatacagtttcctaacacttacctggagggttctgttagagtagtaacaacttttgatgctgagtactgtagacatggtacatgcgaaaggtcagaagtaggtatttgcctatctaccagtggtagatgggttcttaataatgagcattacagagctctatcaggagttttctgtggtgttgatgcgatgaatctcatagctaacatctttactcctcttgtgcaacctgtgggtgctttagatgtgtctgcttccgtagtggctggtggtattattgccatattggtgacttgtgctgcctactactttatgaaattcagacgtgtttttggtgagtacaaccatgttgttgctgctaatgcacttttgtttttgatgtctttcactatactctgtctggtaccagcttacagctttctgccgggagtctactcagtcttttacttgtacttgacattctatttcaccaatgatgtttcattcttggctcaccttcaatggtttgccatgttttctcctattgtgcctttttggataacagcaatctatgtattctgtatttctctgaagcactgccattggttctttaacaactatcttaggaaaagagtcatgtttaatggagttacatttagtaccttcgaggaggctgctttgtgtacctttttgctcaacaaggaaatgtacctaaaattgcgtagcgagacactgttgccacttacacagtataacaggtatcttgctctatataacaagtacaagtatttcagtggagccttagatactaccagctatcgtgaagcagcttgctgccacttagcaaaggctctaaatgactttagcaactcaggtgctgatgttctctaccaaccaccacagacatcaatcacttctgctgttctgcagagtggttttaggaaaatggcattcccgtcaggcaaagttgaagggtgcatggtacaagtaacctgtggaactacaactcttaatggattgtggttggatgacacagtatactgtccaagacatgtcatttgcacagcagaagacatgcttaatcctaactatgaagatctgctcattcgcaaatccaaccatagctttcttgttcaggctggcaatgttcaacttcgtgttattggccattctatgcaaaattgtctgcttaggcttaaagttgatacttttaaccctaagacacccaagtataaatttgtccgtatccaacctggtcaaacattttcagttctagcatgctacaatggttcaccatctggtgtttatcagtgtgccatgagacctaatcataccattaaaggttctttccttaatggatcatgtggtagtgttggttttaacattgattatgattgcgtgtctttctgctatatgcatcatatggagcttccaacaggagtacacgctggtactgacttagaaggtaaattctatggtccatttgttgacagacaaactgcacaggctgcaggtacagacacaaccataacattaaatgttttggcatggctgtatgctgctgttatcaatggtgataggtggtttcttaatagattcaccactactttgaatgactttaaccttgtggcaatgaagtacaactatgaacctttgacacaagatcatgttgacatattgggacctctttctgctcaaacaggaattgccgtcttagatatgtgtgctgctttgaaagagctgctgcagaatggtatgaatggtcgtactatccttggtagcactattttagaagatgagtttacaccatttgatgttgttagacaatgctctggtgttaccttccaaggtaagttcaagaaaattgttaagggcactcatcattggatgcttttaactttcttgacatcactattgattcttgttcaaagtacacagtggtcactgtttttctttgtttacgagaatgctttcttgccatttactcttggtattatggcaattgctgcatgtgctatgctgcttgttaagcataagcacgcattcttgtgcttgtttctgttaccttctcttgcaacagttgcttactttaatatggtctacatgcctgctagctgggtgatgcgtatcatgacatggcttgaattggctgacactagcttgtctggttataggcttaaggattgtgttatgtatgcttcagctttagttttgcttattctcatgacagctcgcactgtttatgatgatgctgctagacgtgtttggacactgatgaatgtcattacacttgtttacaaagtctactatggtaatgctttagatcaagctatttccatgtgggccttagttatttctgtaacctctaactattctggtgtcgttacgactatcatgtttttagctagagctatagtgtttgtgtgtgttgagtattatccattgttatttattactggcaacaccttacagtgtatcatgcttgtttattgtttcttaggctattgttgctgctgctactttggccttttctgtttactcaaccgttacttcaggcttactcttggtgtttatgactacttggtctctacacaagaatttaggtatatgaactcccaggggcttttgcctcctaagagtagtattgatgctttcaagcttaacattaagttgttgggtattggaggtaaaccatgtatcaaggttgctactgtacagtctaaaatgtctgacgtaaagtgcacatctgtggtactgctctcggttcttcaacaacttagagtagagtcatcttctaaattgtgggcacaatgtgtacaactccacaatgatattcttcttgcaaaagacacaactgaagctttcgagaagatggtttctcttttgtctgttttgctatccatgcagggtgctgtagacattaataggttgtgcgaggaaatgctcgataaccgtgctactcttcaggctattgcttcagaatttagttctttaccatcatatgccgcttatgccactgcccaggaggcctatgagcaggctgtagctaatggtgattctgaagtcgttctcaaaaagttaaagaaatctttgaatgtggctaaatctgagtttgaccgtgatgctgccatgcaacgcaagttggaaaagatggcagatcaggctatgacccaaatgtacaaacaggcaagatctgaggacaagagggcaaaagtaactagtgctatgcaaacaatgctcttcactatgcttaggaagcttgataatgatgcacttaacaacattatcaacaatgcgcgtgatggttgtgttccactcaacatcataccattgactacagcagccaaactcatggttgttgtccctgattatggtacctacaagaacacttgtgatggtaacacctttacatatgcatctgcactctgggaaatccagcaagttgttgatgcggatagcaagattgttcaacttagtgaaattaacatggacaattcaccaaatttggcttggcctcttattgttacagctctaagagccaactcagctgttaaactacagaataatgaactgagtccagtagcactacgacagatgtcctgtgcggctggtaccacacaaacagcttgtactgatgacaatgcacttgcctactataacaattcgaagggaggtaggtttgtgctggcattactatcagaccaccaagatctcaaatgggctagattccctaagagtgatggtacaggtacaatttacacagaactggaaccaccttgtaggtttattacagacacaccaaaagggcctaaagtgaaatacttgtacttcatcaaaggcttaaacaacctaaatagaggtatggtgctgggcagtttagctgctacagtacgtcttcaggctggaaatgctacagaagtacctgccaattcaactgtgctttccttctgtgcttttgcagtagaccctgctaaagcatataaggattacctagcaagtggaggacaaccaatcaccaactgtgtgaagatgttgtgtacacacactggtacaggacaggcaattactgtaacaccagaagctaacatggaccaagagtcctttggtggtgcttcatgttgtctgtattgtagatgccacattgaccatccaaatcctaaaggattctgtgacttgaaaggtaagtacgtccaaatacctaccacttgtgctaatgacccagtgggttttacacttagaaacacagtctgtaccgtctgcggaatgtggaaaggttatggctgtagttgtgaccaactccgcgaacccttgatgcagtctgcggatgcatcaacgtttttaaacgggtttgcggtgtaagtgcagcccgtcttacaccgtgcggcacaggcactagtactgatgtcgtctacaggacttttgatatttacaacgaaaaagttgctggttttgcaaagttcctaaaaactaattgctgtcgcttccaggagaaggatgaggaaggcaatttattagactcttactttgtagttaagaggcatactatgtctaactaccaacatgaagagactatttataacttggttaaagattgtccagcggttgctgtccatgactttttcaagtttagagtagatggtgacatggtaccacatatatcacgtcagcgtctaactaaatacacaatggctgatttagtctatgctctacgtcattttgatgagggtaattgtgatacattaaaagaaatactcgtcacatacaattgctgtgatgatgattatttcaataagaaggattggtatgacttcgtagagaatcctgacatcttacgcgtatatgctaacttaggtgagcgtgtacgccaatcattattaaagactgtacaattctgcgatgctatgcgtgatgcaggcattgtaggcgtactgacattagataatcaggatcttaatgggaactggtacgatttcggtgatttcgtacaagtagcaccaggctgcggagttcctattgtggattcatattactcattgctgatgcccatcctcactttgactagggcattggctgctgagtcccatatggatgctgatctcgcaaaaccacttattaagtgggatttgctgaattatgattttacggaagagagactttgtctcttcgaccgttattttaaatattgggaccagacataccatcccaattgtattaactgtttggatgataggtgtatcctttcattgtgcaaactttaatgtgttattttctactgtgtttccacctacaagttttggaccactagtaagaaaaatatttgtagatggtgttccttttgttgtttcaactggataccattttcgtgagttaggagtcgtacataatcaggatgtaaacttacatagctcgcgtctcagtttcaaggaacttttagtgtatgctgctgatccagctatgcatgcagcttctggcaatttattgctagataaacgcactacatgcttttcagtagctgcactaacaaacaatgttgcttttcaaactgtcaaacccggtaattttaataaagacttttatgactttgctgtgtctaaaggtttctttaaggaaggaagttctgttgaactaaaacacttcttctttgctcaggatggcaacgctgctatcagtgattatgactattatcgttataatctgccaacaatgtgtgatatcagacaactcctattcgtagttgaagttgttgataaatactttgattgttacgatggtggctgtattaatgccaaccaagtaatcgttaacaatctggataaatcagctggtttcccatttaataaatggggtaaggctagactttattatgactcaatgagttatgaggatcaagatgcacttttcgcgtatactaagcgtaatgtcatccctactataactcaaatgaatcttaagtatgccattagtgcaaagaatagagctcgcaccgtagctggtgtctctatctgtagtactatgacaaatagacagtttcatcagaaattattgaagtcaatagccgccactagaggagctactgtggtaattggaacaagcaagttttacggtggctggcataatatgttaaaaactgtttacagtgatgtagaaactccacaccttatgggttgggattatccaaaatgtgacagagccatgcctaacatgcttaggataatggcctctcttgttcttgctcgcaaacataacacttgctgtaacttatcacaccgtttctacaggttagctaacgagtgtgcgcaagtattaagtgagatggtcatgtgtggcggctcactatatgttaaaccaggtggaacatcatccggtgatgctacaactgcttatgctaatagtgtctttaacatttgtcaagctgttacagccaatgtaaatgcacttctttcaactgatggtaataagatagctgacaagtatgtccgcaatctacaacacaggctctatgagtgtctctatagaaatagggatgttgatcatgaattcgtggatgagttttacgcttacctgcgtaaacatttctccatgatgattctttctgatgatgccgttgtgtgctataacagtaactatgcggctcaaggtttagtagctagcattaagaactttaaggcagttctttattatcaaaataatgtgttcatgtctgaggcaaaatgttggactgagactgaccttactaaaggacctcacgaattttgctcacagcatacaatgctagttaaacaaggagatgattacgtgtacctgccttacccagatccatcaagaatattaggcgcaggctgttttgtcgatgatattgtcaaaacagatggtacacttatgattgaaaggttcgtgtcactggctattgatgcttacccacttacaaaacatcctaatcaggagtatgctgatgtctttcacttgtatttacaatacattagaaagttacatgatgagcttactggccacatgttggacatgtattccgtaatgctaactaatgataacacctcacggtactgggaacctgagttttatgaggctatgtacacaccacatacagtcttgcaggctgtaggtgcttgtgtattgtgcaattcacagacttcacttcgttgcggtgcctgtattaggagaccattcctatgttgcaagtgctgctatgaccatgtcatttcaacatcacacaaattagtgttgtctgttaatccctatgtttgcaatgccccaggttgtgatgtcactgatgtgacacaactgtatctaggaggtatgagctattattgcaagtcacataagcctcccattagttttccattatgtgctaatggtcaggtttttggtttatacaaaaacacatgtgtaggcagtgacaatgtcactgacttcaatgcgatagcaacatgtgattggactaatgctggcgattacatacttgccaacacttgtactgagagactcaagcttttcgcagcagaaacgctcaaagccactgaggaaacatttaagctgtcatatggtattgccactgtacgcgaagtactctctgacagagaattgcatctttcatgggaggttggaaaacctagaccaccattgaacagaaactatgtctttactggttaccgtgtaactaaaaatagtaaagtacagattggagagtacacctttgaaaaaggtgactatggtgatgctgttgtgtacagaggtactacgacatacaagttgaatgttggtgattactttgtgttgacatctcacactgtaatgccacttagtgcacctactctagtgccacaagagcactatgtgagaattactggcttgtacccaacactcaacatctcagatgagttttctagtaatgttgcaaattatcaaaaggtcggcatgcaaaagtactctacactccaaggaccacctggtactggtaagagtcattttgccatcggacttgctctctattacccatctgctcgcatagtgtatacggcatgctctcatgcagctgttgatgccctatgtgaaaaggcattaaaatatttgcccatagataaatgtagtagaatcatacctgcgcgtgcgcgcgtagagtgttttgataaattcaaagtgaattcaacactagaacagtatgttttctgcactgtaaatgcattgccagaaacaactgctgacattgtagtctttgatgaaatctctatggctactaattatgacttgagtgttgtcaatgctagacttcgtgcaaaacactacgtctatattggcgatcctgctcaattaccagccccccgcacattgctgactaaaggcacactagaaccagaatattttaattcagtgtgcagacttatgaaaacaataggtccagacatgttccttggaacttgtcgccgttgtcctgctgaaattgttgacactgtgagtgctttagtttatgacaataagctaaaagcacacaaggataagtcagctcaatgcttcaaaatgttctacaaaggtgttattacacatgatgtttcatctgcaatcaacagacctcaaataggcgttgtaagagaatttcttacacgcaatcctgcttggagaaaagctgtttttatctcaccttataattcacagaacgctgtagcttcaaaaatcttaggattgcctacgcagactgttgattcatcacagggttctgaatatgactatgtcatattcacacaaactactgaaacagcacactcttgtaatgtcaaccgcttcaatgtggctatcacaagggcaaaaattggcattttgtgcataatgtctgatagagatctttatgacaaactgcaatttacaagtctagaaataccacgtcgcaatgtggctacattacaagcagaaaatgtaactggactttttaaggactgtagtaagatcattactggtcttcatcctacacaggcacctacacacctcagcgttgatataaagttcaagactgaaggattatgtgttgacataccaggcataccaaaggacatgacctaccgtagactcatctctatgatgggtttcaaaatgaattaccaagtcaatggttaccctaatatgtttatcacccgcgaagaagctattcgtcacgttcgtgcgtggattggctttgatgtagagggctgtcatgcaactagagatgctgtgggtactaacctacctctccagctaggattttctacaggtgttaacttagtagctgtaccgactggttatgttgacactgaaaataacacagaattcaccagagttaatgcaaaacctccaccaggtgaccagtttaaacatcttataccactcatgtataaaggcttgccctggaatgtagtgcgtattaagatagtacaaatgctcagtgatacactgaaaggattgtcagacagagtcgtgttcgtcctttgggcgcatggctttgagcttacatcaatgaagtactttgtcaagattggacctgaaagaacgtgttgtctgtgtgacaaacgtgcaacttgcttttctacttcatcagatacttatgcctgctggaatcattctgtgggttttgactatgtctataacccatttatgattgatgttcagcagtggggctttacgggtaaccttcagagtaaccatgaccaacattgccaggtacatggaaatgcacatgtggctagttgtgatgctatcatgactagatgtttagcagtccatgagtgctttgttaagcgcgttgattggtctgttgaataccctattataggagatgaactgagggttaattctgcttgcagaaaagtacaacacatggttgtgaagtctgcattgcttgctgataagtttccagttcttcatgacattggaaatccaaaggctatcaagtgtgtgcctcaggctgaagtagaatggaagttctacgatgctcagccatgtagtgacaaagcttacaaaatagaggaactcttctattcttatgctacacatcacgataaattcactgatggtgtttgtttgttttggaattgtaacgttgatcgttacccagccaatgcaattgtgtgtaggtttgacacaagagtcttgtcaaacttgaacttaccaggctgtgatggtggtagtttgtatgtgaataagcatgcattccacactccagctttcgataaaagtgcatttactaatttaaagcaattgcctttcttttactattctgatagtccttgtgagtctcatggcaaacaagtagtgtcggatattgattatgttccactcaaatctgctacgtgtattacacgatgcaatttaggtggtgctgtttgcagacaccatgcaaatgagtaccgacagtacttggatgcatataatatgatgatttctgctggatttagcctatggatttacaaacaatttgatacttataacctgtggaatacatttaccaggttacagagtttagaaaatgtggcttataatgttgttaataaaggacactttgatggacacgccggcgaagcacctgtttccatcattaataatgctgtttacacaaaggtagatggtattgatgtggagatctttgaaaataagacaacacttcctgttaatgttgcatttgagctttgggctaagcgtaacattaaaccagtgccagagattaagatactcaataatttgggtgttgatatcgctgctaatactgtaatctgggactacaaaagagaagccccagcacatgtatctacaataggtgtctgcacaatgactgacattgccaagaaacctactgagagtgcttgttcttcacttactgtcttgtttgatggtagagtggaaggacaggtagacctttttagaaacgcccgtaatggtgttttaataacagaaggttcagtcaaaggtctaacaccttcaaagggaccagcacaagctagcgtcaatggagtcacattaattggagaatcagtaaaaacacagtttaactactttaagaaagtagacggcattattcaacagttgcctgaaacctactttactcagagcagagacttagaggattttaagcccagatcacaaatggaaactgactttctcgagctcgctatggatgaattcatacagcgatataagctcgagggctatgccttcgaacacatcgtttatggagatttcagtcatggacaacttggcggtcttcatttaatgataggcttagccaagcgctcacaagattcaccacttaaattagaggattttatccctatggacagcacacaagaatgtagtgaaaaattacttcataacagatgcgcaaacaggttcatcaaaatgtgtgtgttctgtgattgatcttttacttgatgactttgtcgagataataaagtcacaagatttgtcagtgatttcaaaagtggtcaaggttacaattgactatgctgaaatttcattcatgctttggtgtaaggatggacatgttgaaaccttctacccaaaactacaagcaagtcaagcgtggcaaccaggtgttgcgatgcctaacttgtacaagatgcaaagaatgcttcttgaaaagtgtgaccttcagaattatggtgaaaatgctgttataccaaaaggaataatgatgaatgtcgcaaagtatactcaactgtgtcaatacttaaatacacttactttagctgtaccctacaacatgagagttattcactttggtgctggctctgataaaggagttgcaccaggtacagctgtgctcagacaatggttgccaactggcacactacttgtcgattcagatcttaatgacttcgtctccgacgcagattctactttaattggagactgtgcaacagtacatacggctaataaatgggaccttattattagcgatatgtatgaccctaggaccaaacatgtgacaaaagagaatgactctaaagaagggtttttcacttatctgtgtggatttataaagcaaaaactagccctgggtggttctatagctgtaaagataacagagcattcttggaatgctgacctttacaagcttatgggccatttctcatggtggacagcttttgttacaaatgtaaatgcatcatcatcggaagcatttttaattggggctaactatcttggcaagccgaaggaacaaattgatggctataccatgcatgctaactacattttctggaggaacacaaatcctatccagttgtcttcctattcactctttgacatgagcaaatttcctcttaaattaagaggaactgctgtaatgtctcttaaggagaatcaaatcaatgatatgatttattctcttctggaaaaaggtaggcttatcattagagaaaacaacagagttgtggtttcaagtgatattcttgttaacaactaaacgaacatgtttattttcttattatttcttactctcactagtggtagtgaccttgaccggtgcaccacttttgatgatgttcaagctcctaattacactcaacatacttcatctatgaggggggtttactatcctgatgaaatttttagatcagacactctttatttaactcaggatttatttcttccattttattctaatgttacagggtttcatactattaatcatacgtttggcaaccctgtcataccttttaaggatggtatttattttgctgccacagagaaatcaaatgttgtccgtggttgggtttttggttctaccatgaacaacaagtcacagtcggtgattattattaacaattctactaatgttgttatacgagcatgtaactttgaattgtgtgacaaccctttctttgctgtttctaaacccatgggtacacagacacatactatgatattcgataatgcatttaattgcactttcgagtacatatctgatgccttttcgcttgatgtttcagaaaagtcaggtaattttaaacacttacgagagtttgtgtttaaaaataaagatgggtttctctatgtttataagggctatcaacctatagatgtagttcgtgatctaccttctggttttaacactttgaaacctatttttaagttgcctcttggtattaacattacaaattttagagccattcttacagccttttcacctgctcaagacatttggggcacgtcagctgcagcctattttgttggctatttaaagccaactacatttatgctcaagtatgatgaaaatggtacaatcacagatgctgttgattgttctcaaaatccacttgctgaactcaaatgctctgttaagagctttgagattgacaaaggaatttaccagacctctaatttcagggttgttccctcaggagatgttgtgagattccctaatattacaaacttgtgtccttttggagaggtttttaatgctactaaattcccttctgtctatgcatgggagagaaaaaaaatttctaattgtgttgctgattactctgtgctctacaactcaacatttttttcaacctttaagtgctatggcgtttctgccactaagttgaatgatctttgcttctccaatgtctatgcagattcttttgtagtcaagggagatgatgtaagacaaatagcgccaggacaaactggtgttattgctgattataattataaattgccagatgatttcatgggttgtgtccttgcttggaatactaggaacattgatgctacttcaactggtaattataattataaatataggtatcttagacatggcaagcttaggccctttgagagagacatatctaatgtgcctttctcccctgatggcaaaccttgcaccccacctgctcttaattgttattggccattaaatgattatggtttttacaccactactggcattggctaccaaccttacagagttgtagtactttcttttgaacttttaaatgcaccggccacggtttgtggaccaaaattatccactgaccttattaagaaccagtgtgtcaattttaattttaatggactcactggtactggtgtgttaactccttcttcaaagagatttcaaccatttcaacaatttggccgtgatgtttctgatttcactgattccgttcgagatcctaaaacatctgaaatattagacatttcaccttgctcttttgggggtgtaagtgtaattacacctggaacaaatgcttcatctgaagttgctgttctatatcaagatgttaactgcactgatgtttctacagcaattcatgcagatcaactcacaccagcttggcgcatatattctactggaaacaatgtattccagactcaagcaggctgtcttataggagctgagcatgtcgacacttcttatgagtgcgacattcctattggagctggcatttgtgctagttaccatacagtttctttattacgtagtactagccaaaaatctattgtggcttatactatgtctttaggtgctgatagttcaattgcttactctaataacaccattgctatacctactaacttttcaattagcattactacagaagtaatgcctgtttctatggctaaaacctccgtagattgtaatatgtacatctgcggagattctactgaatgtgctaatttgcttctccaatatggtagcttttgcacacaactaaatcgtgcactctcaggtattgctgctgaacaggatcgcaacacacgtgaagtgttcgctcaagtcaaacaaatgtacaaaaccccaactttgaaatattttggtggttttaatttttcacaaatattacctgaccctctaaagccaactaagaggtcttttattgaggacttgctctttaataaggtgacactcgctgatgctggcttcatgaagcaatatggcgaatgcctaggtgatattaatgctagagatctcatttgtgcgcagaagttcaatggacttacagtgttgccacctctgctcactgatgatatgattgctgcctacactgctgctctagttagtggtactgccactgctggatggacatttggtgctggcgctgctcttcaaataccttttgctatgcaaatggcatataggttcaatggcattggagttacccaaaatgttctctatgagaaccaaaaacaaatcgccaaccaatttaacaaggcgattagtcaaattcaagaatcacttacaacaacatcaactgcattgggcaagctgcaagacgttgttaaccagaatgctcaagcattaaacacacttgttaaacaacttagctctaattttggtgcaatttcaagtgtgctaaatgatatcctttcgcgacttgataaagtcgaggcggaggtacaaattgacaggttaattacaggcagacttcaaagccttcaaacctatgtaacacaacaactaatcagggctgctgaaatcagggcttctgctaatcttgctgctactaaaatgtctgagtgtgttcttggacaatcaaaaagagttgacttttgtggaaagggctaccaccttatgtccttcccacaagcagccccgcatggtgttgtcttcctacatgtcacgtatgtgccatcccaggagaggaacttcaccacagcgccagcaatttgtcatgaaggcaaggcatacttccctcgtgaaggtgtttttgtgtttaatggcacttcttggtttattacacagaggaacttcttttctccacaaataattactacagacaatacatttgtctcaggaaattgtgatgtcgttattggcatcattaacaacacagtttatgatcctctgcaacctgagcttgactcattcaaagaagagctggacaagtacttcaaaaatcatacatcaccagatgttgatcttggcgacatttcaggcattaacgcttctgtcgtcaacattcaaaaagaaattgaccgcctcaatgaggtcgctaaaaatttaaatgaatcactcattgaccttcaagaattgggaaaatatgagcaatatattaaatggccttggtatgtttggctcggcttcattgctggactaattgccatcgtcatggttacaatcttgctttgttgcatgactagttgttgcagttgcctcaagggtgcatgctcttgtggttcttgctgcaagtttgatgaggatgactctgagccagttctcaagggtgtcaaattacattacacataaacgagcttatggatttgtttatgagattttttactcttggatcaattactgcacagccagtaaaaattgacaatgcttctcctgcaagtactgttcatgctacagcaacgataccgctacaagcctcactccctttcggatggcttgttattggcgttgcatttcttgctgtttttcagagcgctaccaaaataattgcgctcaataaaagatggcagctagccctttataagggcttccagttcatttgcaatttactgctgctatttgttaccatctattcacatcttttgcttgtcgctgcaggtatggaggcgcaatttttgtacctctatgccttgatatattttctacaatgcatcaacgcatgtagaattattatgagatgttggctttgttggaagtgcaaatccaagaacccattactttatgatgccaactactttgtttgctggcacacacataactatgactactgtataccatataacagtgtcacagatacaattgtcgttactgaaggtgacggcatttcaacaccaaaactcaaagaagactaccaaattggtggttattctgaggataggcactcaggtgttaaagactatgtcgttgtacatggctatttcaccgaagtttactaccagcttgagtctacacaaattactacagacactggtattgaaaatgctacattcttcatctttaacaagcttgttaaagacccaccgaatgtgcaaatacacacaatcgacggctcttcaggagttgctaatccagcaatggatccaatttatgatgagccgacgacgactactagcgtgcctttgtaagcacaagaaagtgagtacgaacttatgtactcattcgtttcggaagaaacaggtacgttaatagttaatagcgtacttctttttcttgctttcgtggtattcttgctagtcacactagccatccttactgcgcttcgattgtgtgcgtactgctgcaatattgttaacgtgagtttagtaaaaccaacggtttacgtctactcgcgtgttaaaaatctgaactcttctgaaggagttcctgatcttctggtctaaacgaactaactattattattattctgtttggaactttaacattgcttatcatggcagacaacggtactattaccgttgaggagcttaaacaactcctggaacaatggaacctagtaataggtttcctatgcctagcctggattatgttactacaatttgcctattctaatcggaacaggtttttgtacataataaagcttgttttcctctggctcttgtggccagtaacacttgcttgttttgtgcttgctgctgtctacagaattaattgggtgactggcgggattgcgattgcaatggcttgtattgtaggcttgatgtggcttagctacttcgttgcttccttcaggctgtttgctcgtacccgctcaatgtggtcattcaacccagaaacaaacattcttctcaatgtgcctctccgggggacaattgtgaccagaccgctcatggaaagtgaacttgtcattggtgctgtgatcattcgtggtcacttgcgaatggccggacactccctagggcgctgtgacattaaggacctgccaaaagagatcactgtggctacatcacgaacgctttcttattacaaattaggagcgtcgcagcgtgtaggcactgattcaggttttgctgcatacaaccgctaccgtattggaaactataaattaaatacagaccacgccggtagcaacgacaatattgctttgctagtacagtaagtgacaacagatgtttcatcttgttgacttccaggttacaatagcagagatattgattatcattatgaggactttcaggattgctatttggaatcttgacgttataataagttcaatagtgagacaattatttaagcctctaactaagaagaattattcggagttagatgatgaagaacctatggagttagattatccataaaacgaacatgaaaattattctcttcctgacattgattgtatttacatcttgcgagctatatcactatcaggagtgtgttagaggtacgactgtactactaaaagaaccttgcccatcaggaacatatgagggcaattcaccatttcaccctcttgctgacaataaatttgcactaacttgcactagcacacactttgcttttgcttgtgctgacggtactcgacatacctatcagctgcgtgcaagatcagtttcaccaaaacttttcatcagacaagaggaggttcaacaagagctctactcgccactttttctcattgttgctgctctagtatttttaatactttgcttcaccattaagagaaagacagaatgaatgagctcactttaattgacttctatttgtgctttttagcctttctgctattccttgttttaataatgcttattatattttggttttcactcgaaatccaggatctagaagaaccttgtaccaaagtctaaacgaacatgaaacttctcattgttttgacttgtatttctctatgcagttgcatatgcactgtagtacagcgctgtgcatctaataaacctcatgtgcttgaagatccttgtaaggtacaacactaggggtaatacttatagcactgcttggctttgtgctctaggaaaggttttaccttttcatagatggcacactatggttcaaacatgcacacctaatgttactatcaactgtcaagatccagctggtggtgcgcttatagctaggtgttggtaccttcatgaaggtcaccaaactgctgcatttagagacgtacttgttgttttaaataaacgaacaaattaaaatgtctgataatggaccccaatcaaaccaacgtagtgccccccgcattacatttggtggacccacagattcaactgacaataaccagaatggaggacgcaatggggcaaggccaaaacagcgccgaccccaaggtttacccaataatactgcgtcttggttcacagctctcactcagcatggcaaggaggaacttagattccctcgaggccagggcgttccaatcaacaccaatagtggtccagatgaccaaattggctactaccgaagagctacccgacgagttcgtggtggtgacggcaaaatgaaagagctcagccccagatggtacttctattacctaggaactggcccagaagcttcacttccctacggcgctaacaaagaaggcatcgtatgggttgcaactgagggagccttgaatacacccaaagaccacattggcacccgcaatcctaataacaatgctgccaccgtgctacaacttcctcaaggaacaacattgccaaaaggcttctacgcagagggaagcagaggcggcagtcaagcctcttctcgctcctcatcacgtagtcgcggtaattcaagaaattcaactcctggcagcagtaggggaaattctcctgctcgaatggctagcggaggtggtgaaactgccctcgcgctattgctgctagacagattgaaccagcttgagagcaaagtttctggtaaaggccaacaacaacaaggccaaactgtcactaagaaatctgctgctgaggcatctaaaaagcctcgccaaaaacgtactgccacaaaacagtacaacgtcactcaagcatttgggagacgtggtccagaacaaacccaaggaaatttcggggaccaagacctaatcagacaaggaactgattacaaacattggccgcaaattgcacaatttgctccaagtgcctctgcattctttggaatgtcacgcattggcatggaagtcacaccttcgggaacatggctgacttatcatggagccattaaattggatgacaaagatccacaattcaaagacaacgtcatactgctgaacaagcacattgacgcatacaaaacattcccaccaacagagcctaaaaaggacaaaaagaaaaagactgatgaagctcagcctttgccgcagagacaaaagaagcagcccactgtgactcttcttcctgcggctgacatggatgatttctccagacaacttcaagattccatgagtggagcttctgctgattcaactcaggcataaacactcatgatgaccacacaaggcagatgggctatgtaaacgttttcgcaattccgtttacgatacatagtctactcttgtgcagaatgaattctcgtaactaaacagcacaagtaggtttagttaactttaatctcacatagcaatctttaatcaatgtgtaacattagggaggacttgaaagagccaccacattttcatcgaggccacgcggagtacgatcgagggtacagtgaataatgctagggagagctgcctatatggaagagccctaatgtgtaaaattaattttagtagtgctatccccatgtgattttaatagcttcttaggagaatgacaaaaaaaaaaaaaaaa

SEQ ID NO: 29801 - DNA, 29751 bp, SARS Coronavirus
atattaggtttttacctacccaggaaaagccaaccaacctcgatctcttgtagatctgttctctaaacgaactttaaaatctgtgtagctgtcgctcggctgcatgcctagtgcacctacgcagtataaacaataataaattttactgtcgttgacaagaaacgagtaactcgtccctcttctgcagactgcttacggtttcgtccgtgttgcagtcgatcatcagcatacctaggtttcgtccgggtgtgaccgaaaggtaagatggagagccttgttcttggtgtcaacgagaaaacacacgtccaactcagtttgcctgtccttcaggttagagacgtgctagtgcgtggcttcggggactctgtggaagaggccctatcggaggcacgtgaacacctcaaaaatggcacttgtggtctagtagagctggaaaaaggcgtactgccccagcttgaacagccctatgtgttcattaaacgttctgatgccttaagcaccaatcacggccacaaggtcgttgagctggttgcagaaatggacggcattcagtacggtcgtagcggtataacactgggagtactcgtgccacatgtgggcgaaaccccaattgcataccgcaatgttcttcttcgtaagaacggtaataagggagccggtggtcatagctatggcatcgatctaaagtcttatgacttaggtgacgagcttggcactgatcccattgaagattatgaacaaaactggaacactaagcatggcagtggtgcactccgtgaactcactcgtgagctcaatggaggtgcagtcactcgctatgtcgacaacaatttctgtggcccagatgggtaccctcttgattgcatcaaagattttctcgcacgcgcgggcaagtcaatgtgcactctttccgaacaacttgattacatcgagtcgaagagaggtgtctactgctgccgtgaccatgagcatgaaattgcctggttcactgagcgctctgataagagctacgagcaccagacacccttcgaaattaagagtgccaagaaatttgacactttcaaaggggaatgcccaaagtttgtgtttcctcttaactcaaaagtcaaagtcattcaaccacgtgttgaaaagaaaaagactgagggtttcatggggcgtatacgctctgtgtaccctgttgcatctccacaggagtgtaacaatatgcacttgtctaccttgatgaaatgtaatcattgcgatgaagtttcatggcagacgtgcgactttctgaaagccacttgtgaacattgtggcactgaaaatttagttattgaaggacctactacatgtgggtacctacctactaatgctgtagtgaaaatgccatgtcctgcctgtcaagacccagagattggacctgagcatagtgttgcagattatcacaaccactcaaacattgaaactcgactccgcaagggaggtaggactagatgttttggaggctgtgtgtttgcctatgttggctgctataataagcgtgcctactgggttcctcgtgctagtgctgatattggctcaggccatactggcattactggtgacaatgtggagaccttgaatgaggatctccttgagatactgagtcgtgaacgtgttaacattaacattgttggcgattttcatttgaatgaagaggttgccatcattttggcatctttctctgcttctacaagtgcctttattgacactataaagagtcttgattacaagtctttcaaaaccattgttgagtcctgcggtaactataaagttaccaagggaaagcccgtaaaaggtgcttggaacattggacaacagagatcagttttaacaccactgtgtggttttccctcacaggctgctggtgttatcagatcaatttttgcgcgcacacttgatgcagcaaaccactcaattcctgatttgcaaagagcagctgtcaccatacttgatggtatttctgaacagtcattacgtcttgtcgacgccatggtttatacttcagacctgctcaccaacagtgtcattattatggcatatgtaactggtggtcttgtacaacagacttctcagtggttgtctaatcttttgggcactactgttgaaaaactcaggcctatctttgaatggattgaggcgaaacttagtgcaggagttgaatttctcaaggatgcttgggagattctcaaatttctcattacaggtgtttttgacatcgtcaagggtcaaatacaggttgcttcagataacatcaaggattgtgtaaaatgcttcattgatgttgttaacaaggcactcgaaatgtgcattgatcaagtcactatcgctggcgcaaagttgcgatcactcaacttaggtgaagtcttcatcgctcaaagcaagggactttaccgtcagtgtatacgtggcaaggagcagctgcaactactcatgcctcttaaggcaccaaaagaagtaacctttcttgaaggtgattcacatgacacagtacttacctctgaggaggttgttctcaagaacggtgaactcgaagcactcgagacgcccgttgatagcttcacaaatggagctatcgttggcacaccagtctgtgtaaatggcctcatgctcttagagattaaggacaaagaacaatactgcgcattgtctcctggtttactggctacaaacaatgtctttcgcttaaaagggggtgcaccaattaaaggtgtaacctttggagaagatactgtttgggaagttcaaggttacaagaatgtgagaatcacatttgagcttgatgaacgtgttgacaaagtgcttaatgaaaagtgctctgtctacactgttgaatccggtaccgaagttactgagtttgcatgtgttgtagcagaggctgttgtgaagactttacaaccagtttctgatctccttaccaacatgggtattgatcttgatgagtggagtgtagctacattctacttatttgatgatgctggtgaagaaaacttttcatcacgtatgtattgttccttttaccctccagatgaggaagaagaggacgatgcagagtgtgaggaagaagaaattgatgaaacctgtgaacatgagtacggtacagaggatgattatcaaggtctccctctggaatttggtgcctcagctgaaacagttcgagttgaggaagaagaagaggaagactggctggatgatactactgagcaatcagagattgagccagaaccagaacctacacctgaagaaccagttaatcagtttactggttatttaaaacttactgacaatgttgccattaaatgtgttgacatcgttaaggaggcacaaagtgctaatcctatggtgattgtaaatgctgctaacatacacctgaaacatggtggtggtgtagcaggtgcactcaacaaggcaaccaatggtgccatgcaaaaggagagtgatgattacattaagctaaatggccctcttacagtaggagggtcttgtttgctttctggacataatcttgctaagaagtgtctgcatgttgttggacctaacctaaatgcaggtgaggacatccagcttcttaaggcagcatatgaaaatttcaattcacaggacatcttacttgcaccattgttgtcagcaggcatatttggtgctaaaccacttcagtctttacaagtgtgcgtgcagacggttcgtacacaggtttatattgcagtcaatgacaaagctctttatgagcaggttgtcatggattatcttgataacctgaagcctagagtggaagcacctaaacaagaggagccaccaaacacagaagattccaaaactgaggagaaatctgtcgtacagaagcctgtcgatgtgaagccaaaaattaaggcctgcattgatgaggttaccacaacactggaagaaactaagtttcttaccaataagttactcttgtttgctgatatcaatggtaagctttaccatgattctcagaacatgcttagaggtgaagatatgtctttccttgagaaggatgcaccttacatggtaggtgatgttatcactagtggtgatatcacttgtgttgtaataccctccaaaaaggctggtggcactactgagatgctctcaagagctttgaagaaagtgccagttgatgagtatataaccacgtaccctggacaaggatgtgctggttatacacttgaggaagctaagactgctcttaagaaatgcaaatctgcattttatgtactaccttcagaagcacctaatgctaaggaagagattctaggaactgtatcctggaatttgagagaaatgcttgctcatgctgaagagacaagaaaattaatgcctatatgcatggatgttagagccataatggcaaccatccaacgtaagtataaaggaattaaaattcaagagggcatcgttgactatggtgtccgattcttcttttatactagtaaagagcctgtagcttctattattacgaagctgaactctctaaatgagccgcttgtcacaatgccaattggttatgtgacacatggttttaatcttgaagaggctgcgcgctgtatgcgttctcttaaagctcctgccgtagtgtcagtatcatcaccagatgctgttactacatataatggatacctcacttcgtcatcaaagacatctgaggagcactttgtagaaacagtttctttggctggctcttacagagattggtcctattcaggacagcgtacagagttaggtgttgaatttcttaagcgtggtgacaaaattgtgtaccacactctggagagccccgtcgagtttcatcttgacggtgaggttctttcacttgacaaactaaagagtctcttatccctgcgggaggttaagactataaaagtgttcacaactgtggacaacactaatctccacacacagcttgtggatatgtctatgacatatggacagcagtttggtccaacatacttggatggtgctgatgttacaaaaattaaacctcatgtaaatcatgagggtaagactttctttgtactacctagtgatgacacactacgtagtgaagctttcgagtactaccatactcttgatgagagttttcttggtaggtacatgtctgctttaaaccacacaaagaaatggaaatttcctcaagttggtggtttaacttcaattaaatgggctgataacaattgttatttgtctagtgttttattagcacttcaacagcttgaagtcaaattcaatgcaccagcacttcaagaggcttattatagagcccgtgctggtgatgctgctaacttttgtgcactcatactcgcttacagtaataaaactgttggcgagcttggtgatgtcagagaaactatgacccatcttctacagcatgctaatttggaatctgcaaagcgagttcttaatgtggtgtgtaaacattgtggtcagaaaactactaccttaacgggtgtagaagctgtgatgtatatgggtactctatcttatgataatcttaagacaggtgtttccattccatgtgtgtgtggtcgtgatgctacacaatatctagtacaacaagagtcttcttttgttatgatgtctgcaccacctgctgagtataaattacagcaaggtacattcttatgtgcgaatgagtacactggtaactatcagtgtggtcattacactcatataactgctaaggagaccctctatcgtattgacggagctcaccttacaaagatgtcagagtacaaaggaccagtgactgatgttttctacaaggaaacatcttacactacaaccatcaagcctgtgtcgtataaactcgatggagttacttacacagagattgaaccaaaattggatgggtattataaaaaggataatgcttactatacagagcagcctatagaccttgtaccaactcaaccattaccaaatgcgagttttgataatttcaaactcacatgttctaacacaaaatttgctgatgatttaaatcaaatgacaggcttcacaaagccagcttcacgagagctatctgtcacattcttcccagacttgaatggcgatgtagtggctattgactatagacactattcagcgagtttcaagaaaggtgctaaattactgcataagccaattgtttggcacattaaccaggctacaaccaagacaacgttcaaaccaaacacttggtgtttacgttgtctttggagtacaaagccagtagatacttcaaattcatttgaagttctggcagtagaagacacacaaggaatggacaatcttgcttgtgaaagtcaacaacccacctctgaagaagtagtggaaaatcctaccatacagaaggaagtcatagagtgtgacgtgaaaactaccgaagttgtaggcaatgtcatacttaaaccatcagatgaaggtgttaaagtaacacaagagttaggtcatgaggatcttatggctgcttatgtggaaaacacaagcattaccattaagaaacctaatgagctttcactagccttaggtttaaaaacaattgccactcatggtattgctgcaattaatagtgttccttggagtaaaattttggcttatgtcaaaccattcttaggacaagcagcaattacaacatcaaattgcgctaagagattagcacaacgtgtgtttaacaattatatgccttatgtgtttacattattgttccaattgtgtacttttactaaaagtaccaattctagaattagagcttcactacctacaactattgctaaaaatagtgttaagagtgttgctaaattatgtttggatgccggcattaattatgtgaagtcacccaaattttctaaattgttcacaatcgctatgtggctattgttgttaagtatttgcttaggttctctaatctgtgtaactgctgcttttggtgtactcttatctaattttggtgctccttcttattgtaatggcgttagagaattgtatcttaattcgtctaacgttactactatggatttctgtgaaggttcttttccttgcagcatttgtttaagtggattagactcccttgattcttatccagctcttgaaaccattcaggtgacgatttcatcgtacaagctagacttgacaattttaggtctggccgctgagtgggttttggcatatatgttgttcacaaaattcttttatttattaggtctttcagctataatgcaggtgttctttggctattttgctagtcatttcatcagcaattcttggctcatgtggtttatcattagtattgtacaaatggcacccgtttctgcaatggttaggatgtacatcttctttgcttctttctactacatatggaagagctatgttcatatcatggatggttgcacctcttcgacttgcatgatgtgctataagcgcaatcgtgccacacgcgttgagtgtacaactattgttaatggcatgaagagatctttctatgtctatgcaaatggaggccgtggcttctgcaagactcacaattggaattgtctcaattgtgacacattttgcactggtagtacattcattagtgatgaagttgctcgtgatttgtcactccagtttaaaagaccaatcaaccctactgaccagtcatcgtatattgttgatagtgttgctgtgaaaaatggcgcgcttcacctctactttgacaaggctggtcaaaagacctatgagagacatccgctctcccattttgtcaatttagacaatttgagagctaacaacactaaaggttcactgcctattaatgtcatagtttttgatggcaagtccaaatgcgacgagtctgcttctaagtctgcttctgtgtactacagtcagctgatgtgccaacctattctgttgcttgaccaagctcttgtatcagacgttggagatagtactgaagtttccgttaagatgtttgatgcttatgtcgacaccttttcagcaacttttagtgttcctatggaaaaacttaaggcacttgttgctacagctcacagcgagttagcaaagggtgtagctttagatggtgtcctttctacattcgtgtcagctgcccgacaaggtgttgttgataccgatgttgacacaaaggatgttattgaatgtctcaaactttcacatcactctgacttagaagtgacaggtgacagttgtaacaatttcatgctcacctataataaggttgaaaacatgacgcccagagatcttggcgcatgtattgactgtaatgcaaggcatatcaatgcccaagtagcaaaaagtcacaatgtttcactcatctggaatgtaaaagactacatgtctttatctgaacagctgcgtaaacaaattcgtagtgctgccaagaagaacaacataccttttagactaacttgtgctacaactagacaggttgtcaatgtcataactactaaaatctcactcaagggtggtaagattgttagtacttgttttaaacttatgcttaaggccacattattgtgcgttcttgctgcattggtttgttatatcgttatgccagtacatacattgtcaatccatgatggttacacaaatgaaatcattggttacaaagccattcaggatggtgtcactcgtgacatcatttctactgatgattgttttgcaaataaacatgctggttttgacgcatggtttagccagcgtggtggttcatacaaaaatgacaaaagctgccctgtagtagctgctatcattacaagagagattggtttcatagtgcctggcttaccgggtactgtgctgagagcaatcaatggtgacttcttgcattttctacctcgtgtttttagtgctgttggcaacatttgctacacaccttccaaactcattgagtatagtgattttgctacctctgcttgcgttcttgctgctgagtgtacaatttttaaggatgctatgggcaaacctgtgccatattgttatgacactaatttgctagagggttctatttcttatagtgagcttcgtccagacactcgttatgtgcttatggatggttccatcatacagtttcctaacacttacctggagggttctgttagagtagtaacaacttttgatgctgagtactgtagacatggtacatgcgaaaggtcagaagtaggtatttgcctatctaccagtggtagatgggttcttaataatgagcattacagagctctatcaggagttttctgtggtgttgatgcgatgaatctcatagctaacatctttactcctcttgtgcaacctgtgggtgctttagatgtgtctgcttcagtagtggctggtggtattattgccatattggtgacttgtgctgcctactactttatgaaattcagacgtgtttttggtgagtacaaccatgttgttgctgctaatgcacttttgtttttgatgtctttcactatactctgtctggtaccagcttacagctttctgccgggagtctactcagtcttttacttgtacttgacattctatttcaccaatgatgtttcattcttggctcaccttcaatggtttgccatgttttctcctattgtgcctttttggataacagcaatctatgtattctgtatttctctgaagcactgccattggttctttaacaactatcttaggaaaagagtcatgtttaatggagttacatttagtaccttcgaggaggctgctttgtgtacctttttgctcaacaaggaaatgtacctaaaattgcgtagcgagacactgttgccacttacacagtataacaggtatcttgctctatataacaagtacaagtatttcagtggagccttagatactaccagctatcgtgaagcagcttgctgccacttagcaaaggctctaaatgactttagcaactcaggtgctgatgttctctaccaaccaccacagacatcaatcacttctgctgttctgcagagtggttttaggaaaatggcattcccgtcaggcaaagttgaagggtgcatggtacaagtaacctgtggaactacaactcttaatggattgtggttggatgacacagtatactgtccaagacatgtcatttgcacagcagaagacatgcttaatcctaactatgaagatctgctcattcgcaaatccaaccatagctttcttgttcaggctggcaatgttcaacttcgtgttattggccattctatgcaaaattgtctgcttaggcttaaagttgatacttctaaccctaagacacccaagtataaatttgtccgtatccaacctggtcaaacattttcagttctagcatgctacaatggttcaccatctggtgtttatcagtgtgccatgagacctaatcataccattaaaggttctttccttaatggatcatgtggtagtgttggttttaacattgattatgattgcgtgtctttctgctatatgcatcatatggagcttccaacaggagtacacgctggtactgacttagaaggtaaattctatggtccatttgttgacagacaaactgcacaggctgcaggtacagacacaaccataacattaaatgttttggcatggctgtatgctgctgttatcaatggtgataggtggtttcttaatagattcaccactactttgaatgactttaaccttgtggcaatgaagtacaactatgaacctttgacacaagatcatgttgacatattgggacctctttctgctcaaacaggaattgccgtcttagatatgtgtgctgctttgaaagagctgctgcagaatggtatgaatggtcgtactatccttggtagcactattttagaagatgagtttacaccatttgatgttgttagacaatgctctggtgttaccttccaaggtaagttcaagaaaattgttaagggcactcatcattggatgcttttaactttcttgacatcactattgattcttgttcaaagtacacagtggtcactgtttttctttgtttacgagaatgctttcttgccatttactcttggtattatggcaattgctgcatgtgctatgctgcttgttaagcataagcacgcattcttgtgcttgtttctgttaccttctcttgcaacagttgcttactttaatatggtctacatgcctgctagctgggtgatgcgtatcatgacatggcttgaattggctgacactagcttgtctggttataggcttaaggattgtgttatgtatgcttcagctttagttttgcttattctcatgacagctcgcactgtttatgatgatgctgctagacgtgtttggacactgatgaatgtcattacacttgtttacaaagtctactatggtaatgctttagatcaagctatttccatgtgggccttagttatttctgtaacctctaactattctggtgtcgttacgactatcatgtttttagctagagctatagtgtttgtgtgtgttgagtattacccattgttatttattactggcaacaccttacagtgtatcatgcttgtttattgtttcttaggctattgttgctgctgctactttggccttttctgtttactcaaccgttacttcaggcttactcttggtgtttatgactacttggtctctacacaagaatttaggtatatgaactcccaggggcttttgcctcctaagagtagtattgatgctttcaagcttaacattaagttgttgggtattggaggtaaaccatgtatcaaggttgctactgtacagtctaaaatgtctgacgtaaagtgcacatctgtggtactgctctcggttcttcaacaacttagagtagagtcatcttctaaattgtgggcacaatgtgtacaactccacaatgatattcttcttgcaaaagacacaactgaagctttcgagaagatggtttctcttttgtctgttttgctatccatgcagggtgctgtagacattaataggttgtgcgaggaaatgctcgataaccgtgctactcttcaggctattgcttcagaatttagttctttaccatcatatgccgcttatgccactgcccaggaggcctatgagcaggctgtagctaatggtgattctgaagtcgttctcaaaaagttaaagaaatctttgaatgtggctaaatctgagtttgaccgtgatgctgccatgcaacgcaagttggaaaagatggcagatcaggctatgacccaaatgtacaaacaggcaagatctgaggacaagagggcaaaagtaactagtgctatgcaaacaatgctcttcactatgcttaggaagcttgataatgatgcacttaacaacattatcaacaatgcgcgtgatggttgtgttccactcaacatcataccattgactacagcagccaaactcatggttgttgtccctgattatggtacctacaagaacacttgtgatggtaacacctttacatatgcatctgcactctgggaaatccagcaagttgttgatgcggatagcaagattgttcaacttagtgaaattaacatggacaattcaccaaatttggcttggcctcttattgttacagctctaagagccaactcagctgttaaactacagaataatgaactgagtccagtagcactacgacagatgtcctgtgcggctggtaccacacaaacagcttgtactgatgacaatgcacttgcctactataacaattcgaagggaggtaggtttgtgctggcattactatcagaccaccaagatctcaaatgggctagattccctaagagtgatggtacaggtacaatttacacagaactggaaccaccttgtaggtttgttacagacacaccaaaagggcctaaagtgaaatacttgtacttcatcaaaggcttaaacaacctaaatagaggtatggtgctgggcagtttagctgctacagtacgtcttcaggctggaaatgctacagaagtacctgccaattcaactgtgctttccttctgtgcttttgcagtagaccctgctaaagcatataaggattacctagcaagtggaggacaaccaatcaccaactgtgtgaagatgttgtgtacacacactggtacaggacaggcaattactgtaacaccagaagctaacatggaccaagagtcctttggtggtgcttcatgttgtctgtattgtagatgccacattgaccatccaaatcctaaaggattctgtgacttgaaaggtaagtacgtccaaatacctaccacttgtgctaatgacccagtgggttttacacttagaaacacagtctgtaccgtctgcggaatgtggaaaggttatggctgtagttgtgaccaactccgcgaacccttgatgcagtctgcggatgcatcaacgtttttaaacgggtttgcggtgtaagtgcagcccgtcttacaccgtgcggcacaggcactagtactgatgtcgtctacagggcttttgatatttacaacgaaaaagttgctggttttgcaaagttcctaaaaactaattgctgtcgcttccaggagaaggatgaggaaggcaatttattagactcttactttgtagttaagaggcatactatgtctaactaccaacatgaagagactatttataacttggttaaagattgtccagcggttgctgtccatgactttttcaagtttagagtagatggtgacatggtaccacatatatcacgtcagcgtctaactaaatacacaatggctgatttagtctatgctctacgtcattttgatgagggtaattgtgatacattaaaagaaatactcgtcacatacaattgctgtgatgatgattatttcaataagaaggattggtatgacttcgtagagaatcctgacatcttacgcgtatatgctaacttaggtgagcgtgtacgccaatcattattaaagactgtacaattctgcgatgctatgcgtgatgcaggcattgtaggcgtactgacattagataatcaggatcttaatgggaactggtacgatttcggtgatttcgtacaagtagcaccaggctgcggagttcctattgtggattcatattactcattgctgatgcccatcctcactttgactagggcattggctgctgagtcccatatggatgctgatctcgcaaaaccacttattaagtgggatttgctgaaatatgattttacggaagagagactttgtctcttcgaccgttattttaaatattgggaccagacataccatcccaattgtattaactgtttggatgataggtgtatccttcattgtgcaaactttaatgtgttattttctactgtgtttccacctacaagttttggaccactagtaagaaaaatatttgtagatggtgttccttttgttgtttcaactggataccattttcgtgagttaggagtcgtacataatcaggatgtaaacttacatagctcgcgtctcagtttcaaggaacttttagtgtatgctgctgatccagctatgcatgcagcttctggcaatttattgctagataaacgcactacatgcttttcagtagctgcactaacaaacaatgttgcttttcaaactgtcaaacccggtaattttaataaagacttttatgactttgctgtgtctaaaggtttctttaaggaaggaagttctgttgaactaaaacacttcttctttgctcaggatggcaacgctgctatcagtgattatgactattatcgttataatctgccaacaatgtgtgatatcagacaactcctattcgtagttgaagttgttgataaatactttgattgttacgatggtggctgtattaatgccaaccaagtaatcgttaacaatctggataaatcagctggtttcccatttaataaatggggtaaggctagactttattatgactcaatgagttatgaggatcaagatgcacttttcgcgtatactaagcgtaatgtcatccctactataactcaaatgaatcttaagtatgccattagtgcaaagaatagagctcgcaccgtagctggtgtctctatctgtagtactatgacaaatagacagtttcatcagaaattattgaagtcaatagccgccactagaggagctactgtggtaattggaacaagcaagttttacggtggctggcataatatgttaaaaactgtttacagtgatgtagaaactccacaccttatgggttgggattatccaaaatgtgacagagccatgcctaacatgcttaggataatggcctctcttgttcttgctcgcaaacataacacttgctgtaacttatcacaccgtttctacaggttagctaacgagtgtgcgcaagtattaagtgagatggtcatgtgtggcggctcactatatgttaaaccaggtggaacatcatccggtgatgctacaactgcttatgctaatagtgtctttaacatttgtcaagctgttacagccaatgtaaatgcacttctttcaactgatggtaataagatagctgacaagtatgtccgcaatctacaacacaggctctatgagtgtctctatagaaatagggatgttgatcatgaattcgtggatgagttttacgcttacctgcgtaaacatttctccatgatgattctttctgatgatgccgttgtgtgctataacagtaactatgcggctcaaggtttagtagctagcattaagaactttaaggcagttctttattatcaaaataatgtgttcatgtctgaggcaaaatgttggactgagactgaccttactaaaggacctcacgaattttgctcacagcatacaatgctagttaaacaaggagatgattacgtgtacctgccttacccagatccatcaagaatattaggcgcaggctgttttgtcgatgatattgtcaaaacagatggtacacttatgattgaaaggttcgtgtcactggctattgatgcttacccacttacaaaacatcctaatcaggagtatgctgatgtctttcacttgtatttacaatacattagaaagttacatgatgagcttactggccacatgttggacatgtattccgtaatgctaactaatgataacacctcacggtactgggaacctgagttttatgaggctatgtacacaccacatacagtcttgcaggctgtaggtgcttgtgtattgtgcaattcacagacttcacttcgttgcggtgcctgtattaggagaccattcctatgttgcaagtgctgctatgaccatgtcatttcaacatcacacaaattagtgttgtctgttaatccctatgtttgcaatgccccaggttgtgatgtcactgatgtgacacaactgtatctaggaggtatgagctattattgcaagtcacataagcctcccattagttttccattatgtgctaatggtcaggtttttggtttatacaaaaacacatgtgtaggcagtgacaatgtcactgacttcaatgcgatagcaacatgtgattggactaatgctggcgattacatacttgccaacacttgtactgagagactcaagcttttcgcagcagaaacgctcaaagccactgaggaaacatttaagctgtcatatggtattgccactgtacgcgaagtactctctgacagagaattgcatctttcatgggaggttggaaaacctagaccaccattgaacagaaactatgtctttactggttaccgtgtaactaaaaatagtaaagtacagattggagagtacacctttgaaaaaggtgactatggtgatgctgttgtgtacagaggtactacgacatacaagttgaatgttggtgattactttgtgttgacatctcacactgtaatgccacttagtgcacctactctagtgccacaagagcactatgtgagaattactggcttgtacccaacactcaacatctcagatgagttttctagcaatgttgcaaattatcaaaaggtcggcatgcaaaagtactctacactccaaggaccacctggtactggtaagagtcattttgccatcggacttgctctctattacccatctgctcgcatagtgtatacggcatgctctcatgcagctgttgatgccctatgtgaaaaggcattaaaatatttgcccatagataaatgtagtagaatcatacctgcgcgtgcgcgcgtagagtgttttgataaattcaaagtgaattcaacactagaacagtatgttttctgcactgtaaatgcattgccagaaacaactgctgacattgtagtctttgatgaaatctctatggctactaattatgacttgagtgttgtcaatgctagacttcgtgcaaaacactacgtctatattggcgatcctgctcaattaccagccccccgcacattgctgactaaaggcacactagaaccagaatattttaattcagtgtgcagacttatgaaaacaataggtccagacatgttccttggaacttgtcgccgttgtcctgctgaaattgttgacactgtgagtgctttagtttatgacaataagctaaaagcacacaaggataagtcagctcaatgcttcaaaatgttctacaaaggtgttattacacatgatgtttcatctgcaatcaacagacctcaaataggcgttgtaagagaatttcttacacgcaatcctgcttggagaaaagctgtttttatctcaccttataattcacagaacgctgtagcttcaaaaatcttaggattgcctacgcagactgttgattcatcacagggttctgaatatgactatgtcatattcacacaaactactgaaacagcacactcttgtaatgtcaaccgcttcaatgtggctatcacaagggcaaaaattggcattttgtgcataatgtctgatagagatctttatgacaaactgcaatttacaagtctagaaataccacgtcgcaatgtggctacattacaagcagaaaatgtaactggactttttaaggactgtagtaagatcattactggtcttcatcctacacaggcacctacacacctcagcgttgatataaagttcaagactgaaggattatgtgttgacataccaggcataccaaaggacatgacctaccgtagactcatctctatgatgggtttcaaaatgaattaccaagtcaatggttaccctaatatgtttatcacccgcgaagaagctattcgtcacgttcgtgcgtggattggctttgatgtagagggctgtcatgcaactagagatgctgtgggtactaacctacctctccagctaggattttctacaggtgttaacttagtagctgtaccgactggttatgttgacactgaaaataacacagaattcaccagagttaatgcaaaacctccaccaggtgaccagtttaaacatcttataccactcatgtataaaggcttgccctggaatgtagtgcgtattaagatagtacaaatgctcagtgatacactgaaaggattgtcagacagagtcgtgttcgtcctttgggcgcatggctttgagcttacatcaatgaagtactttgtcaagattggacctgaaagaacgtgttgtctgtgtgacaaacgtgcaacttgcttttctacttcatcagatacttatgcctgctggaatcattctgtgggttttgactatgtctataacccatttatgattgatgttcagcagtggggctttacgggtaaccttcagagtaaccatgaccaacattgccaggtacatggaaatgcacatgtggctagttgtgatgctatcatgactagatgtttagcagtccatgagtgctttgttaagcgcgttgattggtctgttgaataccctattataggagatgaactgagggttaattctgcttgcagaaaagtacaacacatggttgtgaagtctgcattgcttgctgataagtttccagttcttcatgacattggaaatccaaaggctatcaagtgtgtgcctcaggctgaagtagaatggaagttctacgatgctcagccatgtagtgacaaagcttacaaaatagaggaactcttctattcttatgctacacatcacgataaattcactgatggtgtttgtttgttttggaattgtaacgttgatcgttacccagccaatgcaattgtgtgtaggtttgacacaagagtcttgtcaaacttgaacttaccaggctgtgatggtggtagtttgtatgtgaataagcatgcattccacactccagctttcgataaaagtgcatttactaatttaaagcaattgcctttcttttactattctgatagtccttgtgagtctcatggcaaacaagtagtgtcggatattgattatgttccactcaaatctgctacgtgtattacacgatgcaatttaggtggtgctgtttgcagacaccatgcaaatgagtaccgacagtacttggatgcatataatatgatgatttctgctggatttagcctatggatttacaaacaatttgatacttataacctgtggaatacatttaccaggttacagagtttagaaaatgtggcttataatgttgttaataaaggacactttgatggacacgccggcgaagcacctgtttccatcattaataatgctgtttacacaaaggtagatggtattgatgtggagatctttgaaaataagacaacacttcctgttaatgttgcatttgagctttgggctaagcgtaacattaaaccagtgccagagattaagatactcaataatttgggtgttgatatcgctgctaatactgtaatctgggactacaaaagagaagccccagcacatgtatctacaataggtgtctgcacaatgactgacattgccaagaaacctactgagagtgcttgttcttcacttactgtcttgtttgatggtagagtggaaggacaggtagacctttttagaaacgcccgtaatggtgttttaataacagaaggttcagtcaaaggtctaacaccttcaaagggaccagcacaagctagcgtcaatggagtcacattaattggagaatcagtaaaaacacagtttaactactttaagaaagtagacggcattattcaacagttgcctgaaacctactttactcagagcagagacttagaggattttaagcccagatcacaaatggaaactgactttctcgagctcgctatggatgaattcatacagcgatataagctcgagggctatgccttcgaacacatcgtttatggagatttcagtcatggacaacttggcggtcttcatttaatgataggcttagccaagcgctcacaagattcaccacttaaattagaggattttatccctatggacagcacagtgaaaaattacttcataacagatgcgcaaacaggttcatcaaaatgtgtgtgttctgtgattgatcttttacttgatgactttgtcgagataataaagtcacaagatttgtcagtgatttcaaaagtggtcaaggttacaattgactatgctgaaatttcattcatgctttggtgtaaggatggacatgttgaaaccttctacccaaaactacaagcaagtcaagcgtggcaaccaggtgttgcgatgcctaacttgtacaagatgcaaagaatgcttcttgaaaagtgtgaccttcagaattatggtgaaaatgctgttataccaaaaggaataatgatgaatgtcgcaaagtatactcaactgtgtcaatacttaaatacacttactttagctgtaccctacaacatgagagttattcactttggtgctggctctgataaaggagttgcaccaggtacagctgtgctcagacaatggttgccaactggcacactacttgtcgattcagatcttaatgacttcgtctccgacgcagattctactttaattggagactgtgcaacagtacatacggctaataaatgggaccttattattagcgatatgtatgaccctaggaccaaacatgtgacaaaagagaatgactctaaagaagggtttttcacttatctgtgtggatttataaagcaaaaactagccctgggtggttctatagctgtaaagataacagagcattcttggaatgctgacctttacaagcttatgggccatttctcatggtggacagcttttgttacaaatgtaaatgcatcatcatcggaagcatttttaattggggctaactatcttggcaagccgaaggaacaaattgatggctataccatgcatgctaactacattttctggaggaacacaaatcctatccagttgtcttcctattcactctttgacatgagcaaatttcctcttaaattaagaggaactgctgtaatgtctcttaaggagaatcaaatcaatgatatgatttattctcttctggaaaaaggtaggcttatcattagagaaaacaacagagttgtggtttcaagtgatattcttgttaacaactaaacgaacatgtttattttcttattatttcttactctcactagtggtagtgaccttgaccggtgcaccacttttgatgatgttcaagctcctaattacactcaacatacttcatctatgaggggggtttactatcctgatgaaatttttagatcagacactctttatttaactcaggatttatttcttccattttattctaatgttacagggtttcatactattaatcatacgtttggcaaccctgtcataccttttaaggatggtatttattttgctgccacagagaaatcaaatgttgtccgtggttgggtttttggttctaccatgaacaacaagtcacagtcggtgattattattaacaattctactaatgttgttatacgagcatgtaactttgaattgtgtgacaaccctttctttgctgtttctaaacccatgggtacacagacacatactatgatattcgataatgcatttaattgcactttcgagtacatatctgatgccttttcgcttgatgtttcagaaaagtcaggtaattttaaacacttacgagagtttgtgtttaaaaataaagatgggtttctctatgtttataagggctatcaacctatagatgtagttcgtgatctaccttctggttttaacactttgaaacctatttttaagttgcctcttggtattaacattacaaattttagagccattcttacagccttttcacctgctcaagacatttggggcacgtcagctgcagcctattttgttggctatttaaagccaactacatttatgctcaagtatgatgaaaatggtacaatcacagatgctgttgattgttctcaaaatccacttgctgaactcaaatgctctgttaagagctttgagattgacaaaggaatttaccagacctctaatttcagggttgttccctcaggagatgttgtgagattccctaatattacaaacttgtgtccttttggagaggtttttaatgctactaaattcccttctgtctatgcatgggagagaaaaaaaatttctaattgtgttgctgattactctgtgctctacaactcaacatttttttcaacctttaagtgctatggcgtttctgccactaagttgaatgatctttgcttctccaatgtctatgcagattcttttgtagtcaagggagatgatgtaagacaaatagcgccaggacaaactggtgttattgctgattataattataaattgccagatgatttcatgggttgtgtccttgcttggaatactaggaacattgatgctacttcaactggtaattataattataaatataggtatcttagacatggcaagcttaggccctttgagagagacatatctaatgtgcctttctcccctgatggcaaaccttgcaccccacctgctcttaattgttattggccattaaatgattatggtttttacaccactactggcattggctaccaaccttacagagttgtagtactttcttttgaacttttaaatgcaccggccacggtttgtggaccaaaattatccactgaccttattaagaaccagtgtgtcaattttaattttaatggactcactggtactggtgtgttaactccttcttcaaagagatttcaaccatttcaacaatttggccgtgatgtttctgatttcactgattccgttcgagatcctaaaacatctgaaatattagacatttcaccttgctcttttgggggtgtaagtgtaattacacctggaacaaatgcttcatctgaagttgctgttctatatcaagatgttaactgcactgatgtttctacagcaattcatgcagatcaactcacaccagcttggcgcatatattctactggaaacaatgtattccagactcaagcaggctgtcttataggagctgagcatgtcgacacttcttatgagtgcgacattcctattggagctggcatttgtgctagttaccatacagtttctttattacgtagtactagccaaaaatctattgtggcttatactatgtctttaggtgctgatagttcaattgcttactctaataacaccattgctatacctactaacttttcaattagcattactacagaagtaatgcctgtttctatggctaaaacctccgtagattgtaatatgtacatctgcggagattctactgaatgtgctaatttgcttctccaatatggtagcttttgcacacaactaaatcgtgcactctcaggtattgctgctgaacaggatcgcaacacacgtgaagtgttcgctcaagtcaaacaaatgtacaaaaccccaactttgaaatattttggtggttttaatttttcacaaatattacctgaccctctaaagccaactaagaggtcttttattgaggacttgctctttaataaggtgacactcgctgatgctggcttcatgaagcaatatggcgaatgcctaggtgatattaatgctagagatctcatttgtgcgcagaagttcaatggacttacagtgttgccacctctgctcactgatgatatgattgctgcctacactgctgctctagttagtggtactgccactgctggatggacatttggtgctggcgctgctcttcaaataccttttgctatgcaaatggcatataggttcaatggcattggagttacccaaaatgttctctatgagaaccaaaaacaaatcgccaaccaatttaacaaggcgattagtcaaattcaagaatcacttacaacaacatcaactgcattgggcaagctgcaagacgttgttaaccagaatgctcaagcattaaacacacttgttaaacaacttagctctaattttggtgcaatttcaagtgtgctaaatgatatcctttcgcgacttgataaagtcgaggcggaggtacaaattgacaggttaattacaggcagacttcaaagccttcaaacctatgtaacacaacaactaatcagggctgctgaaatcagggcttctgctaatcttgctgctactaaaatgtctgagtgtgttcttggacaatcaaaaagagttgacttttgtggaaagggctaccaccttatgtccttcccacaagcagccccgcatggtgttgtcttcctacatgtcacgtatgtgccatcccaggagaggaacttcaccacagcgccagcaatttgtcatgaaggcaaagcatacttccctcgtgaaggtgtttttgtgtttaatggcacttcttggtttattacacagaggaacttcttttctccacaaataattactacagacaatacatttgtctcaggaaattgtgatgtcgttattggcatcattaacaacacagtttatgatcctctgcaacctgagcttgactcattcaaagaagagctggacaagtacttcaaaaatcatacatcaccagatgttgatcttggcgacatttcaggcattaacgcttctgtcgtcaacattcaaaaagaaattgaccgcctcaatgaggtcgctaaaaatttaaatgaatcactcattgaccttcaagaattgggaaaatatgagcaatatattaaatggccttggtatgtttggctcggcttcattgctggactaattgccatcgtcatggttacaatcttgctttgttgcatgactagttgttgcagttgcctcaagggtgcatgctcttgtggttcttgctgcaagtttgatgaggatgactctgagccagttctcaagggtgtcaaattacattacacataaacgaacttatggatttgtttatgagattttttactcttggatcaattactgcacagccagtaaaaattgacaatgcttctcctgcaagtactgttcatgctacagcaacgataccgctacaagcctcactccctttcggatggcttgttattggcgttgcatttcttgctgtttttcagagcgctaccaaaataattgcgctcaataaaagatggcagctagccctttataagggcttccagttcatttgcaatttactgctgctatttgttaccatctattcacatcttttgcttgtcgctgcaggtatggaggcgcaatttttgtacctctatgccttgatatattttctacaatgcatcaacgcatgtagaattattatgagatgttggctttgttggaagtgcaaatccaagaacccattactttatgatgccaactactttgtttgctggcacacacataactatgactactgtataccatataacagtgtcacagatacaattgtcgttactgaaggtgacggcatttcaacaccaaaactcaaagaagactaccaaattggtggttattctgaggataggcactcaggtgttaaagactatgtcgttgtacatggctatttcaccgaagtttactaccagcttgagtctacacaaattactacagacactggtattgaaaatgctacattcttcatctttaacaagcttgttaaagacccaccgaatgtgcaaatacacacaatcgacggctcttcaggagttgctaatccagcaatggatccaatttatgatgagccgacgacgactactagcgtgcctttgtaagcacaagaaagtgagtacgaacttatgtactcattcgtttcggaagaaacaggtacgttaatagttaatagcgtacttctttttcttgctttcgtggtattcttgctagtcacactagccatccttactgcgcttcgattgtgtgcgtactgctgcaatattgttaacgtgagtttagtaaaaccaacggtttacgtctactcgcgtgttaaaaatctgaactcttctgaaggagttcctgatcttctggtctaaacgaactaactattattattattctgtttggaactttaacattgcttatcatggcagacaacggtactattaccgttgaggagcttaaacaactcctggaacaatggaacctagtaataggtttcctattcctagcctggattatgttactacaatttgcctattctaatcggaacaggtttttgtacataataaagcttgttttcctctggctcttgtggccagtaacacttgcttgttttgtgcttgctgctgtctacagaattaattgggtgactggcgggattgcgattgcaatggcttgtattgtaggcttgatgtggcttagctacttcgttgcttccttcaggctgtttgctcgtacccgctcaatgtggtcattcaacccagaaacaaacattcttctcaatgtgcctctccgggggacaattgtgaccagaccgctcatggaaagtgaacttgtcattggtgctgtgatcattcgtggtcacttgcgaatggccggacactccctagggcgctgtgacattaaggacctgccaaaagagatcactgtggctacatcacgaacgctttcttattacaaattaggagcgtcgcagcgtgtaggcactgattcaggttttgctgcatacaaccgctaccgtattggaaactataaattaaatacagaccacgccggtagcaacgacaatattgctttgctagtacagtaagtgacaacagatgtttcatcttgttgacttccaggttacaatagcagagatattgattatcattatgaggactttcaggattgctatttggaatcttgacgttataataagttcaatagtgagacaattatttaagcctctaactaagaagaattattcggagttagatgatgaagaacctatggagttarattatccataaaacgaacatgaaaattattctcttcctgacattgattgtatttacatcttgcgagctatatcactatcaggagtgtgttagaggtacgactgtactactaaaagaaccttgcccatcaggaacatacgagggcaattcaccatttcaccctcttgctgacaataaatttgcactaacttgcactagcacacactttgcttttgcttgtgctgacggtactcgacatacctatcagctgcgtgcaagatcagtttcaccaaaacttttcatcagacaagaggaggttcaacaagagctctactcgccactttttctcattgttgctgctctagtatttttaatactttgcttcaccattaagagaaagacagaatgaatgagctcactttaattgacttctatttgtgctttttagcctttctgctattccttgttttaataatgcttattatattttggttttcactcgaaatccaggatctagaagaaccttgtaccaaagtctaaacgaacatgaaacttctcattgttttgacttgtatttctctatgcagttgcatatgcactgtagtacagcgctgtgcatctaataaacctcatgtgcttgaagatccttgtaaggtacaacactaggggtaatacttatagcactgcttggctttgtgctctaggaaaggttttaccttttcatagatggcacactatggttcaaacatgcacacctaatgttactatcaactgtcaagatccagctggtggtgcgcttatagctaggtgttggtaccttcatgaaggtcaccaaactgctgcatttagagacgtacttgttgttttaaataaacgaacaaattaaaatgtctgataatggaccccaatcaaaccaacgtagtgccccccgcattacatttggtggacccacagattcaactgacaataaccagaatggaggacgcaatggggcaaggccaaaacagcgccgaccccaaggtttacccaataatactgcgtcttggttcacagctctcactcagcatggcaaggaggaacttagattccctcgaggccagggcgttccaatcaacaccaatagtggtccagatgaccaaattggctactaccgaagagctacccgacgagttcgtggtggtgacggcaaaatgaaagagctcagccccagatggtacttctattacctaggaactggcccagaagcttcacttccctacggcgctaacaaagaaggcatcgtatgggttgcaactgagggagccttgaatacacccaaagaccacattggcacccgcaatcctaataacaatgctgccaccgtgctacaacttcctcaaggaacaacattgccaaaaggcttctacgcagagggaagcagaggcggcagtcaagcctcttctcgctcctcatcacgtagtcgcggtaattcaagaaattcaactcctggcagcagtaggggaaattctcctgctcgaatggctagcggaggtggtgaaactgccctcgcgctattgctgctagacagattgaaccagcttgagagcaaagtttctggtaaaggccaacaacaacaaggccaaactgtcactaagaaatctgctgctgaggcatctaaaaagcctcgccaaaaacgtactgccacaaaacagtacaacgtcactcaagcatttgggagacgtggtccagaacaaacccaaggaaatttcggggaccaagacctaatcagacaaggaactgattacaaacattggccgcaaattgcacaatttgctccaagtgcctctgcattctttggaatgtcacgcattggcatggaagtcacaccttcgggaacatggctgacttatcatggagccattaaattggatgacaaagatccacaattcaaagacaacgtcatactgctgaacaagcacattgacgcatacaaaacattcccaccaacagagcctaaaaaggacaaaaagaaaaagactgatgaagctcagcctttgccgcagagacaaaagaagcagcccactgtgactcttcttcctgcggctgacatggatgatttctccagacaacttcaaaattccatgagtggagcttctgctgattcaactcaggcataaacactcatgatgaccacacaaggcagatgggctatgtaaacgttttcgcaattccgtttacgatacatagtctactcttgtgcagaatgaattctcgtaactaaacagcacaagtaggtttagttaactttaatctcacatagcaatctttaatcaatgtgtaacattagggaggacttgaaagagccaccacattttcatcgaggccacgcggagtacgatcgagggtacagtgaataatgctagggagagctgcctatatggaagagccctaatgtgtaaaattaattttagtagtgctatccccatgtgattttaatagcttcttaggagaatgacaaaaaaaaaaaaaaaaaaaaaaaa

SEQ ID NO: 29802 - DNA, 29573 bp, SARS Coronavirus
aactttaaaatctgtgtagctgtcgctcggctgcatgcctagtgcacctacgcagtataaacaataataaattttactgtcgttgacaagaaacgagtaactcgtccctcttctgcagactgcttacggtttcgtccgtgttgcagtcgatcatcagcatacctaggtttcgtccgggtgtgaccgaaaggtaagatggagagccttgttcttggtgtcaacgagaaaacacacgtccaactcagtttgcctgtccttcaggttagagacgtgctagtgcgtggcttcggggactctgtggaagaggccctatcggaggcacgtgaacacctcaaaaatggcacttgtggtctagtagagctggaaaaaggcgtactgccccagcttgaacagccctatgtgttcattaaacgttctgatgccttaagcaccaatcacggccacaaggtcgttgagctggttgcagaaatggacggcattcagtacggtcgtagcggtataacactgggagtactcgtgccacatgtgggcgaaaccccaattgcataccgcaatgttcttcttcgtaagaacggtaataagggagccggtggtcatagctatggcatcgatctaaagtcttatgacttaggtgacgagcttggcactgatcccattgaagattatgaacaaaactggaacactaagcatggcagtggtgcactccgtgaactcactcgtgagctcaatggaggtgcagtcactcgctatgtcgacaacaatttctgtggcccagatgggtaccctcttgattgcatcaaagattttctcgcacgcgcgggcaagtcaatgtgcactctttccgaacaacttgattacatcgagtcgaagagaggtgtctactgctgccgtgaccatgagcatgaaattgcctggttcactgagcgctctgataagagctacgagcaccagacacccttcgaaattaagagtgccaagaaatttgacactttcaaaggggaatgcccaaagtttgtgtttcctcttaactcaaaagtcaaagtcattcaaccacgtgttgaaaagaaaaagactgagggtttcatggggcgtatacgctctgtgtaccctgttgcatctccacaggagtgtaacaatatgcacttgtctaccttgatgaaatgtaatcattgcgatgaagtttcatggcagacgtgcgactttctgaaagccacttgtgaacattgtggcactgaaaatttagttattgaaggacctactacatgtgggtacctacctactaatgctgtagtgaaaatgccatgtcctgcctgtcaagacccagagattggacctgagcatagtgttgcagattatcacaaccactcaaacattgaaactcgactccgcaagggaggtaggactagatgttttggaggctgtgtgtttgcctatgttggctgctataataagcgtgcctactgggttcctcgtgctagtgctgatattggctcaggccatactggcattactggtgacaatgtggagaccttgaatgaggatctccttgagatactgagtcgtgaacgtgttaacattaacattgttggcgattttcatttgaatgaagaggttgccatcattttggcatctttctctgcttctacaagtgcctttattgacactataaagagtcttgattacaagtctttcaaaaccattgttgagtcctgcggtaactataaagttaccaagggaaagcccgtaaaaggtgcttggaacattggacaacagagatcagttttaacaccactgtgtggttttccctcacaggctgctggtgttatcagatcaatttttgcgcgcacacttgatgcagcaaaccactcaattcctgatttgcaaagagcagctgtcaccatacttgatggtatttctgaacagtcattacgtcttgtcgacgccatggtttatacttcagacctgctcaccaacagtgtcattattatggcatatgtaactggtggtcttgtacaacagacttctcagtggttgtctaatcttttgggcactactgttgaaaaactcaggcctatctttgaatggattgaggcgaaacttagtgcaggagttgaatttctcaaggatgcttgggagattctcaaatttctcattacaggtgtttttgacatcgtcaagggtcaaatacaggttgcttcagataacatcaaggattgtgtaaaatgcttcattgatgttgttaacaaggcactcgaaatgtgcattgatcaagtcactatcgctggcgcaaagttgcgatcactcaacttaggtgaagtcttcatcgctcaaagcaagggactttaccgtcagtgtatacgtggcaaggagcagctgcaactactcatgcctcttaaggcaccaaaagaagtaacctttcttgaaggtgattcacatgacacagtacttacctctgaggaggttgttctcaagaacggtgaactcgaagcactcgagacgcccgttgatagcttcacaaatggagctatcgttggcacaccagtctgtgtaaatggcctcatgctcttagagattaaggacaaagaacaatactgcgcattgtctcctggtttactggctacaaacaatgtctttcgcttaaaagggggtgcaccaattaaaggtgtaacctttggagaagatactgtttgggaagttcaaggttacaagaatgtgagaatcacatttgagcttgatgaacgtgttgacaaagtgcttaatgaaaagtgctctgtctacactgttgaatccggtaccgaagttactgagtttgcatgtgttgtagcagaggctgttgtgaagactttacaaccagtttctgatctccttaccaacatgggtattgatcttgatgagtggagtgtagctacattctacttatttgatgatgctggtgaagaaaacttttcatcacgtatgtattgttccttttaccctccagatgaggaagaagaggacgatgcagagtgtgaggaagaagaaattgatgaaacctgtgaacatgagtacggtacagaggatgattatcaaggtctccctctggaatttggtgcctcagctgaaacagttcgagttgaggaagaagaagaggaagactggctggatgatactactgagcaatcagagattgagccagaaccagaacctacacctgaagaaccagttaatcagtttactggttatttaaaacttactgacaatgttgccattaaatgtgttgacatcgttaaggaggcacaaagtgctaatcctatggtgattgtaaatgctgctaacatacacctgaaacatggtggtggtgtagcaggtgcactcaacaaggcaaccaatggtgccatgcaaaaggagagtgatgattacattaagctaaatggccctcttacagtaggagggtcttgtttgctttctggacataatcttgctaagaagtgtctgcatgttgttggacctaacctaaatgcaggtgaggacatccagcttcttaaggcagcatatgaaaatttcaattcacaggacatcttacttgcaccattgttgtcagcaggcatatttggtgctaaaccacttcagtctttacaagtgtgcgtgcagacggttcgtacacaggtttatattgcagtcaatgacaaagctctttatgagcaggttgtcatggattatcttgataacctgaagcctagagtggaagcacctaaacaagaggagccaccaaacacagaagattccaaaactgaggagaaatccgtcgtacagaagcctgtcgatgtgaagccaaaaattaaggcctgcattgatgaggttaccacaacactggaagaaactaagtttcttaccaataagttactcttgtttgctgatatcaatggtaagctttaccatgattctcagaacatgcttagaggtgaagatatgtctttccttgagaaggatgcaccttacatggtaggtgatgttatcactagtggtgatatcacttgtgttgtaataccctccaaaaaggctggtggcactactgagatgctctcaagagctttgaagaaagtgccagttgatgagtatataaccacgtaccctggacaaggatgtgctggttatacacttgaggaagctaagactgctcttaagaaatgcaaatctgcattttatgtactaccttcagaagcacctaatgctaaggaagagattctaggaactgtatcctggaatttgagagaaatgcttgctcatgctgaagagacaagaaaattaatgcctatatgcatggatgttagagccataatggcaaccatccaacgtaagtataaaggaattaaaattcaagagggcatcgttgactatggtgtccgattcttcttttatactagtaaagagcctgtagcttctattattacgaagctgaactctctaaatgagccgcttgtcacaatgccaattggttatgtgacacatggttttaatcttgaagaggctgcgcgctgtatgcgttctcttaaagctcctgccgtagtgtcagtatcatcaccagatgctgttactacatataatggatacctcacttcgtcatcaaagacatctgaggagcactttgtagaaacagtttctttggctggctcttacagagattggtcctattcaggacagcgtacagagttaggtgttgaatttcttaagcgtggtgacaaaattgtgtaccacactctggagagccccgtcgagtttcatcttgacggtgaggttctttcacttgacaaactaaagagtctcttatccctgcgggaggttaagactataaaagtgttcacaactgtggacaacactaatctccacacacagcttgtggatatgtctatgacatatggacagcagtttggtccaacatacttggatggtgctgatgttacaaaaattaaacctcatgtaaatcatgagggtaagactttctttgtactacctagtgatgacacactacgtagtgaagctttcgagtactaccatactcttgatgagagttttcttggtaggtacatgtctgctttaaaccacacaaagaaatggaaatttcctcaagttggtggtttaacttcaattaaatgggctgataacaattgttatttgtctagtgttttattagcacttcaacagcttgaagtcaaattcaatgcaccagcacttcaagaggcttattatagagcccgtgctggtgatgctgctaacttttgtgcactcatactcgcttacagtaataaaactgttggcgagcttggtgatgtcagagaaactatgacccatcttctacagcatgctaatttggaatctgcaaagcgagttcttaatgtggtgtgtaaacattgtggtcagaaaactactaccttaacgggtgtagaagctgtgatgtatatgggtactctatcttatgataatcttaagacaggtgtttccattccatgtgtgtgtggtcgtgatgctacacaatatctagtacaacaagagtcttcttttgttatgatgtctgcaccacctgctgagtataaattacagcaaggtacattcttatgtgcgaatgagtacactggtaactatcagtgtggtcattacactcatataactgctaaggagaccctctatcgtattgacggagctcaccttacaaagatgtcagagtacaaaggaccagtgactgatgttttctacaaggaaacatcttacactacaaccatcaagcctgtgtcgtataaactcgatggagttacttacacagagattgaaccaaaattggatgggtattataaaaaggataatgcttactatacagagcagcctatagaccttgtaccaactcaaccattaccaaatgcgagttttgataatttcaaactcacatgttctaacacaaaatttgctgatgatttaaatcaaatgacaggcttcacaaagccagcttcacgagagctatctgtcacattcttcccagacttgaatggcgatgtagtggctattgactatagacactattcagcgagtttcaagaaaggtgctaaattactgcataagccaattgtttggcacattaaccaggctacaaccaagacaacgttcaaaccaaacacttggtgtttacgttgtctttggagtacaaagccagtagatacttcaaattcatttgaagttctggcagtagaagacacacaaggaatggacaatcttgcttgtgaaagtcaacaacccacctctgaagaagtagtggaaaatcctaccatacagaaggaagtcatagagtgtgacgtgaaaactaccgaagttgtaggcaatgtcatacttaaaccatcagatgaaggtgttaaagtaacacaagagttaggtcatgaggatcttatggctgcttatgtggaaaacacaagcattaccattaagaaacctaatgagctttcactagccttaggtttaaaaacaattgccactcatggtattgctgcaattaatagtgttccttggagtaaaattttggcttatgtcaaaccattcttaggacaagcagcaattacaacatcaaattgcgctaagagattagcacaacgtgtgtttaacaattatatgccttatgtgtttacattattgttccaattgtgtacttttactaaaagtaccaattctagaattagagcttcactacctacaactattgctaaaaatagtgttaagagtgttgctaaattatgtttggatgccggcattaattatgtgaagtcacccaaattttctaaattgttcacaatcgctatgtggctattgttgttaagtatttgcttaggttctctaatctgtgtaactgctgcttttggtgtactcttatctaattttggtgctccttcttattgtaatggcgttagagaattgtatcttaattcgtctaacgttactactatggatttctgtgaaggttcttttccttgcagcatttgtttaagtggattagactcccttgattcttatccagctcttgaaaccattcaggtgacgatttcatcgtacaagctagacttgacaattttaggtctggccgctgagtgggttttggcatatatgttgttcacaaaattcttttatttattaggtctttcagctataatgcaggtgttctttggctattttgctagtcatttcatcagcaattcttggctcatgtggtttatcattagtattgtacaaatggcacccgtttctgcaatggttaggatgtacatcttctttgcttctttctactacatatggaagagctatgttcatatcatggatggttgcacctcttcgacttgcatgatgtgctataagcgcaatcgtgccacacgcgttgagtgtacaactattgttaatggcatgaagagatctttctatgtctatgcaaatggaggccgtggcttctgcaagactcacaattggaattgtctcaattgtgacacattttgcactggtagtacattcattagtgatgaagttgctcgtgatttgtcactccagtttaaaagaccaatcaaccctactgaccagtcatcgtatattgttgatagtgttgctgtgaaaaatggcgcgcttcacctctactttgacaaggctggtcaaaagacctatgagagacatccgctctcccattttgtcaatttagacaatttgagagctaacaacactaaaggttcactgcctattaatgtcatagtttttgatggcaagtccaaatgcgacgagtctgcttctaagtctgcttctgtgtactacagtcagctgatgtgccaacctattctgttgcttgaccaagctcttgtatcagacgttggagatagtactgaagtttccgttaagatgtttgatgcttatgtcgacaccttttcagcaacttttagtgttcctatggaaaaacttaaggcacttgttgctacagctcacagcgagttagcaaagggtgtagctttagatggtgtcctttctacattcgtgtcagctgcccgacaaggtgttgttgataccgatgttgacacaaaggatgttattgaatgtctcaaactttcacatcactctgacttagaagtgacaggtgacagttgtaacaatttcatgctcacctataataaggttgaaaacatgacgcccagagatcttggcgcatgtattgactgtaatgcaaggcatatcaatgcccaagtagcaaaaagtcacaatgtttcactcatctggaatgtaaaagactacatgtctttatctgaacagctgcgtaaacaaattcgtagtgctgccaagaagaacaacataccttttagactaacttgtgctacaactagacaggttgtcaatgtcataactactaaaatctcactcaagggtggtaagattgttagtacttgttttaaacttatgcttaaggccacattattgtgcgttcttgctgcattggtttgttatatcgttatgccagtacatacattgtcaatccatgatggttacacaaatgaaatcattggttacaaagccattcaggatggtgtcactcgtgacatcatttctactgatgattgttttgcaaataaacatgctggttttgacgcatggtttagccagcgtggtggttcatacaaaaatgacaaaagctgccctgtagtagctgctatcattacaagagagattggtttcatagtgcctggcttaccgggtactgtgctgagagcaatcaatggtgacttcttgcattttctacctcgtgtttttagtgctgttggcaacatttgctacacaccttccaaactcattgagtatagtgattttgctacctctgcttgcgttcttgctgctgagtgtacaatttttaaggatgctatgggcaaacctgtgccatattgttatgacactaatttgctagagggttctatttcttatagtgagcttcgtccagacactcgttatgtgcttatggatggttccatcatacagtttcctaacacttacctggagggttctgttagagtagtaacaacttttgatgctgagtactgtagacatggtacatgcgaaaggtcagaagtaggtatttgcctatctaccagtggtagatgggttcttaataatgagcattacagagctctatcaggagttttctgtggtgttgatgcgatgaatctcatagctaacatctttactcctcttgtgcaacctgtgggtgctttagatgtgtctgcttcagtagtggctggtggtattattgccatattggtgacttgtgctgcctactactttatgaaattcagacgtgtttttggtgagtacaaccatgttgttgctgctaatgcacttttgtttttgatgtctttcactatactctgtctggtaccagcttacagctttctgccgggagtctactcagtcttttacttgtacttgacattctatttcaccaatgatgtttcattcttggctcaccttcaatggtttgccatgttttctcctattgtgcctttttggataacagcaatctatgtattctgtatttctctgaagcactgccattggttctttaacaactatcttaggaaaagagtcatgtttaatggagttacatttagtaccttcgaggaggctgctttgtgtacctttttgctcaacaaggaaatgtacctaaaattgcgtagcgagacactgttgccacttacacagtataacaggtatcttgctctatataacaagtacaagtatttcagtggagccttagatactaccagctatcgtgaagcagcttgctgccacttagcaaaggctctaaatgactttagcaactcaggtgctgatgttctctaccaaccaccacagacatcaatcacttctgctgttctgcagagtggttttaggaaaatggcattcccgtcaggcaaagttgaagggtgcatggtacaagtaacctgtggaactacaactcttaatggattgtggttggatgacacagtatactgtccaagacatgtcatttgcacagcagaagacatgcttaatcctaactatgaagatctgctcattcgcaaatccaaccatagctttcttgttcaggctggcaatgttcaacttcgtgttattggccattctatgcaaaattgtctgcttaggcttaaagttgatacttctaaccctaagacacccaagtataaatttgtccgtatccaacctggtcaaacattttcagttctagcatgctacaatggttcaccatctggtgtttatcagtgtgccatgagacctaatcataccattaaaggttctttccttaatggatcatgtggtagtgttggttttaacattgattatgattgcgtgtctttctgctatatgcatcatatggagcttccaacaggagtacacgctggtactgacttagaaggtaaattctatggtccatttgttgacagacaaactgcacaggctgcaggtacagacacaaccataacattaaatgttttggcatggctgtatgctgctgttatcaatggtgataggtggtttcttaatagattcaccactactttgaatgactttaaccttgtggcaatgaagtacaactatgaacctttgacacaagatcatgttgacatattgggacctctttctgctcaaacaggaattgccgtcttagatatgtgtgctgctttgaaagagctgctgcagaatggtatgaatggtcgtactatccttggtagcactattttagaagatgagtttacaccatttgatgttgttagacaatgctctggtgttaccttccaaggtaagttcaagaaaattgttaagggcactcatcattggatgcttttaactttcttgacatcactattgattcttgttcaaagtacacagtggtcactgtttttctttgtttacgagaatgctttcttgccatttactcttggtattatggcaattgctgcatgtgctatgctgcttgttaagcataagcacgcattcttgtgcttgtttctgttaccttctcttgcaacagttgcttactttaatatggtctacatgcctgctagctgggtgatgcgtatcatgacatggcttgaattggctgacactagcttgtctggttataggcttaaggattgtgttatgtatgcttcagctttagttttgcttattctcatgacagctcgcactgtttatgatgatgctgctagacgtgtttggacactgatgaatgtcattacacttgtttacaaagtctactatggtaatgctttagatcaagctatttccatgtgggccttagttatttctgtaacctctaactattctggtgtcgttacgactatcatgtttttagctagagctatagtgtttgtgtgtgttgagtattatccattgttatttattactggcaacaccttacagtgtatcatgcttgtttattgtttcttaggctattgttgctgctgctactttggccttttctgtttactcaaccgttacttcaggcttactcttggtgtttatgactacttggtctctacacaagaatttaggtatatgaactcccaggggcttttgcctcctaagagtagtattgatgctttcaagcttaacattaagttgttgggtattggaggtaaaccatgtatcaaggttgctactgtacagtctaaaatgtctgacgtaaagtgcacatctgtggtactgctctcggttcttcaacaacttagagtagagtcatcttctaaattgtgggcacaatgtgtacaactccacaatgatattcttcttgcaaaagacacaactgaagctttcgagaagatggtttctcttttgtctgttttgctatccatgcagggtgctgtagacattaataggttgtgcgaggaaatgctcgataaccgtgctactcttcaggctattgcttcagaatttagttctttaccatcatatgccgcttatgccactgcccaggaggcctatgagcaggctgtagctaatggtgattctgaagtcgttctcaaaaagttaaagaaatctttgaatgtggctaaatctgagtttgaccgtgatgctgccatgcaacgcaagttggaaaagatggcagatcaggctatgacccaaatgtacaaacaggcaagatctgaggacaagagggcaaaagtaactagtgctatgcaaacaatgctcttcactatgcttaggaagcttgataatgatgcacttaacaacattatcaacaatgcgcgtgatggttgtgttccactcaacatcataccattgactacagcagccaaactcatggttgttgtccctgattatggtacctacaagaacacttgtgatggtaacacctttacatatgcatctgcactctgggaaatccagcaagttgttgatgcggatagcaagattgttcaacttagtgaaattaacatggacaattcaccaaatttggcttggcctcttattgttacagctctaagagccaactcagctgttaaactacagaataatgaactgagtccagtagcactacgacagatgtcctgtgcggctggtaccacacaaacagcttgtactgatgacaatgcacttgcctactataacaattcgaagggaggtaggtttgtgctggcattactatcagaccaccaagatctcaaatgggctagattccctaagagtgatggtacaggtacaatttacacagaactggaaccaccttgtaggtttgttacagacacaccaaaagggcctaaagtgaaatacttgtacttcatcaaaggcttaaacaacctaaatagaggtatggtgctgggcagtttagctgctacagtacgtcttcaggctggaaatgctacagaagtacctgccaattcaactgtgctttccttctgtgcttttgcagtagaccctgctaaagcatataaggattacctagcaagtggaggacaaccaatcaccaactgtgtgaagatgttgtgtacacacactggtacaggacaggcaattactgtaacaccagaagctaacatggaccaagagtcctttggtggtgcttcatgttgtctgtattgtagatgccacattgaccatccaaatcctaaaggattctgtgacttgaaaggtaagtacgtccaaatacctaccacttgtgctaatgacccagtgggttttacacttagaaacacagtctgtaccgtctgcggaatgtggaaaggttatggctgtagttgtgaccaactccgcgaacccttgatgcagtctgcggatgcatcaacgtttttaaacgggtttgcggtgtaagtgcagcccgtcttacaccgtgcggcacaggcactagtactgatgtcgtctacagggcttttgatatttacaacgaaaaagttgctggttttgcaaagttcctaaaaactaattgctgtcgcttccaggagaaggatgaggaaggcaatttattagactcttactttgtagttaagaggcatactatgtctaactaccaacatgaagagactatttataacttggttaaagattgtccagcggttgctgtccatgactttttcaagtttagagtagatggtgacatggtaccacatatatcacgtcagcgtctaactaaatacacaatggctgatttagtctatgctctacgtcattttgatgagggtaattgtgatacattaaaagaaatactcgtcacatacaattgctgtgatgatgattatttcaataagaaggattggtatgacttcgtagagaatcctgacatcttacgcgtatatgctaacttaggtgagcgtgtacgccaatcattattaaagactgtacaattctgcgatgctatgcgtgatgcaggcattgtaggcgtactgacattagataatcaggatcttaatgggaactggtacgatttcggtgatttcgtacaagtagcaccaggctgcggagttcctattgtggattcatattactcattgctgatgcccatcctcactttgactagggcattggctgctgagtcccatatggatgctgatctcgcaaaaccacttattaagtgggatttgctgaaatatgattttacggaagagagactttgtctcttcgaccgttattttaaatattgggaccagacataccatcccaattgtattaactgtttggatgataggtgtatccttcattgtgcaaactttaatgtgttattttctactgtgtttccacctacaagttttggaccactagtaagaaaaatatttgtagatggtgttccttttgttgtttcaactggataccattttcgtgagttaggagtcgtacataatcaggatgtaaacttacatagctcgcgtctcagtttcaaggaacttttagtgtatgctgctgatccagctatgcatgcagcttctggcaatttattgctagataaacgcactacatgcttttcagtagctgcactaacaaacaatgttgcttttcaaactgtcaaacccggtaattttaataaagacttttatgactttgctgtgtctaaaggtttctttaaggaaggaagttctgttgaactaaaacacttcttctttgctcaggatggcaacgctgctatcagtgattatgactattatcgttataatctgccaacaatgtgtgatatcagacaactcctattcgtagttgaagttgttgataaatactttgattgttacgatggtggctgtattaatgccaaccaagtaatcgttaacaatctggataaatcagctggtttcccatttaataaatggggtaaggctagactttattatgactcaatgagttatgaggatcaagatgcacttttcgcgtatactaagcgtaatgtcatccctactataactcaaatgaatcttaagtatgccattagtgcaaagaatagagctcgcaccgtagctggtgtctctatctgtagtactatgacaaatagacagtttcatcagaaattattgaagtcaatagccgccactagaggagctactgtggtaattggaacaagcaagttttacggtggctggcataatatgttaaaaactgtttacagtgatgtagaaactccacaccttatgggttgggattatccaaaatgtgacagagccatgcctaacatgcttaggataatggcctctcttgttcttgctcgcaaacataacacttgctgtaacttatcacaccgtttctacaggttagctaacgagtgtgcgcaagtattaagtgagatggtcatgtgtggcggctcactatatgttaaaccaggtggaacatcatccggtgatgctacaactgcttatgctaatagtgtctttaacatttgtcaagctgttacagccaatgtaaatgcacttctttcaactgatggtaataagatagctgacaagtatgtccgcaatctacaacacaggctctatgagtgtctctatagaaatagggatgttgatcatgaattcgtggatgagttttacgcttacctgcgtaaacatttctccatgatgattctttctgatgatgccgttgtgtgctataacagtaactatgcggctcaaggtttagtagctagcattaagaactttaaggcagttctttattatcaaaataatgtgttcatgtctgaggcaaaatgttggactgagactgaccttactaaaggacctcacgaattttgctcacagcatacaatgctagttaaacaaggagatgattacgtgtacctgccttacccagatccatcaagaatattaggcgcaggctgttttgtcgatgatattgtcaaaacagatggtacacttatgattgaaaggttcgtgtcactggctattgatgcttacccacttacaaaacatcctaatcaggagtatgctgatgtctttcacttgtatttacaatacattagaaagttacatgatgagcttactggccacatgttggacatgtattccgtaatgctaactaatgataacacctcacggtactgggaacctgagttttatgaggctatgtacacaccacatacagtcttgcaggctgtaggtgcttgtgtattgtgcaattcacagacttcacttcgttgcggtgcctgtattaggagaccattcctatgttgcaagtgctgctatgaccatgtcatttcaacatcacacaaattagtgttgtctgttaatccctatgtttgcaatgccccaggttgtgatgtcactgatgtgacacaactgtatctaggaggtatgagctattattgcaagtcacataagcctcccattagttttccattatgtgctaatggtcaggtttttggtttatacaaaaacacatgtgtaggcagtgacaatgtcactgacttcaatgcgatagcaacatgtgattggactaatgctggcgattacatacttgccaacacttgtactgagagactcaagcttttcgcagcagaaacgctcaaagccactgaggaaacatttaagctgtcatatggtattgccactgtacgcgaagtactctctgacagagaattgcatctttcatgggaggttggaaaacctagaccaccattgaacagaaactatgtctttactggttaccgtgtaactaaaaatagtaaagtacagattggagagtacacctttgaaaaaggtgactatggtgatgctgttgtgtacagaggtactacgacatacaagttgaatgttggtgattactttgtgttgacatctcacactgtaatgccacttagtgcacctactctagtgccacaagagcactatgtgagaattactggcttgtacccaacactcaacatctcagatgagttttctagcaatgttgcaaattatcaaaaggtcggcatgcaaaagtactctacactccaaggaccacctggtactggtaagagtcattttgccatcggacttgctctctattacccatctgctcgcatagtgtatacggcatgctctcatgcagctgttgatgccctatgtgaaaaggcattaaaatatttgcccatagataaatgtagtagaatcatacctgcgcgtgcgcgcgtagagtgttttgataaattcaaagtgaattcaacactagaacagtatgttttctgcactgtaaatgcattgccagaaacaactgctgacattgtagtctttgatgaaatctctatggctactaattatgacttgagtgttgtcaatgctagacttcgtgcaaaacactacgtctatattggcgatcctgctcaattaccagccccccgcacattgctgactaaaggcacactagaaccagaatattttaattcagtgtgcagacttatgaaaacaataggtccagacatgttccttggaacttgtcgccgttgtcctgctgaaattgttgacactgtgagtgctttagtttatgacaataagctaaaagcacacaaggataagtcagctcaatgcttcaaaatgttctacaaaggtgttattacacatgatgtttcatctgcaatcaacagacctcaaataggcgttgtaagagaatttcttacacgcaatcctgcttggagaaaagctgtttttatctcaccttataattcacagaacgctgtagcttcaaaaatcttaggattgcctacgcagactgttgattcatcacagggttctgaatatgactatgtcatattcacacaaactactgaaacagcacactcttgtaatgtcaaccgcttcaatgtggctatcacaagggcaaaaattggcattttgtgcataatgtctgatagagatctttatgacaaactgcaatttacaagtctagaaataccacgtcgcaatgtggctacattacaagcagaaaatgtaactggactttttaaggactgtagtaagatcattactggtcttcatcctacacaggcacctacacacctcagcgttgatataaagttcaagactgaaggattatgtgttgacataccaggcataccaaaggacatgacctaccgtagactcatctctatgatgggtttcaaaatgaattaccaagtcaatggttaccctaatatgtttatcacccgcgaagaagctattcgtcacgttcgtgcgtggattggctttgatgtagagggctgtcatgcaactagagatgctgtgggtactaacctacctctccagctaggattttctacaggtgttaacttagtagctgtaccgactggttatgttgacactgaaaataacacagaattcaccagagttaatgcaaaacctccaccaggtgaccagtttaaacatcttataccactcatgtataaaggcttgccctggaatgtagtgcgtattaagatagtacaaatgctcagtgatacactgaaaggattgtcagacagagtcgtgttcgtcctttgggcgcatggctttgagcttacatcaatgaagtactttgtcaagattggacctgaaagaacgtgttgtctgtgtgacaaacgtgcaacttgcttttctacttcatcagatacttatgcctgctggaatcattctgtgggttttgactatgtctataacccatttatgattgatgttcagcagtggggctttacgggtaaccttcagagtaaccatgaccaacattgccaggtacatggaaatgcacatgtggctagttgtgatgctatcatgactagatgtttagcagtccatgagtgctttgttaagcgcgttgattggtctgttgaataccctattataggagatgaactgagggttaattctgcttgcagaaaagtacaacacatggttgtgaagtctgcattgcttgctgataagtttccagttcttcatgacattggaaatccaaaggctatcaagtgtgtgcctcaggctgaagtagaatggaagttctacgatgctcagccatgtagtgacaaagcttacaaaatagaggagctcttctattcttatgctacacatcacgataaattcactgatggtgtttgtttgttttggaattgtaacgttgatcgttacccagccaatgcaattgtgtgtaggtttgacacaagagtcttgtcaaacttgaacttaccaggctgtgatggtggtagtttgtatgtgaataagcatgcattccacactccagctttcgataaaagtgcatttactaatttaaagcaattgcctttcttttactattctgatagtccttgtgagtctcatggcaaacaagtagtgtcggatattgattatgttccactcaaatctgctacgtgtattacacgatgcaatttaggtggtgctgtttgcagacaccatgcaaatgagtaccgacagtacttggatgcatataatatgatgatttctgctggatttagcctatggatttacaaacaatttgatacttataacctgtggaatacatttaccaggttacagagtttagaaaatgtggcttataatgttgttaataaaggacactttgatggacacgccggcgaagcacctgtttccatcattaataatgctgtttacacaaaggtagatggtattgatgtggagatctttgaaaataagacaacacttcctgttaatgttgcatttgagctttgggctaagcgtaacattaaaccagtgccagagattaagatactcaataatttgggtgttgatatcgctgctaatactgtaatctgggactacaaaagagaagccccagcacatgtatctacaataggtgtctgcacaatgactgacattgccaagaaacctactgagagtgcttgttcttcacttactgtcttgtttgatggtagagtggaaggacaggtagacctttttagaaacgcccgtaatggtgttttaataacagaaggttcagtcaaaggtctaacaccttcaaagggaccagcacaagctagcgtcaatggagtcacattaattggagaatcagtaaaaacacagtttaactactttaagaaagtagacggcattattcaacagttgcctgaaacctactttactcagagcagagacttagaggattttaagcccagatcacaaatggaaactgactttctcgagctcgctatggatgaattcatacagcgatataagctcgagggctatgccttcgaacacatcgtttatggagatttcagtcatggacaacttggcggtcttcatttaatgataggcttagccaagcgctcacaagattcaccacttaaattagaggattttatccctatggacagcacagtgaaaaattacttcataacagatgcgcaaacaggttcatcaaaatgtgtgtgttctgtgattgatcttttacttgatgactttgtcgagataataaagtcacaagatttgtcagtgatttcaaaagtggtcaaggttacaattgactatgctgaaatttcattcatgctttggtgtaaggatggacatgttgaaaccttctacccaaaactacaagcaagtcaagcgtggcaaccaggtgttgcgatgcctaacttgtacaagatgcaaagaatgcttcttgaaaagtgtgaccttcagaattatggtgaaaatgctgttataccaaaaggaataatgatgaatgtcgcaaagtatactcaactgtgtcaatacttaaatacacttactttagctgtaccctacaacatgagagttattcactttggtgctggctctgataaaggagttgcaccaggtacagctgtgctcagacaatggttgccaactggcacactacttgtcgattcagatcttaatgacttcgtctccgacgcagattctactttaattggagactgtgcaacagtacatacggctaataaatgggaccttattattagcgatatgtatgaccctaggaccaaacatgtgacaaaagagaatgactctaaagaagggtttttcacttatctgtgtggatttataaagcaaaaactagccctgggtggttctatagctgtaaagataacagagcattcttggaatgctgacctttacaagcttatgggccatttctcatggtggacagcttttgttacaaatgtaaatgcatcatcatcggaagcatttttaattggggctaactatcttggcaagccgaaggaacaaattgatggctataccatgcatgctaactacattttctggaggaacacaaatcctatccagttgtcttcctattcactctttgacatgagcaaatttcctcttaaattaagaggaactgctgtaatgtctcttaaggagaatcaaatcaatgatatgatttattctcttctggaaaaaggtaggcttatcattagagaaaacaacagagttgtggtttcaagtgatattcttgttaacaactaaacgaacatgtttattttcttattatttcttactctcactagtggtagtgaccttgaccggtgcaccacttttgatgatgttcaagctcctaattacactcaacatacttcatctatgaggggggtttactatcctgatgaaatttttagatcagacactctttatttaactcaggatttatttcttccattttattctaatgttacagggtttcatactattaatcatacgtttggcaaccctgtcataccttttaaggatggtatttattttgctgccacagagaaatcaaatgttgtccgtggttgggtttttggttctaccatgaacaacaagtcacagtcggtgattattattaacaattctactaatgttgttatacgagcatgtaactttgaattgtgtgacaaccctttctttgctgtttctaaacccatgggtacacagacacatactatgatattcgataatgcatttaattgcactttcgagtacatatctgatgccttttcgcttgatgtttcagaaaagtcaggtaattttaaacacttacgagagtttgtgtttaaaaataaagatgggtttctctatgtttataagggctatcaacctatagatgtagttcgtgatctaccttctggttttaacactttgaaacctatttttaagttgcctcttggtattaacattacaaattttagagccattcttacagccttttcacctgctcaagacatttggggcacgtcagctgcagcctattttgttggctatttaaagccaactacatttatgctcaagtatgatgaaaatggtacaatcacagatgctgttgattgttctcaaaatccacttgctgaactcaaatgctctgttaagagctttgagattgacaaaggaatttaccagacctctaatttcagggttgttccctcaggagatgttgtgagattccctaatattacaaacttgtgtccttttggagaggtttttaatgctactaaattcccttctgtctatgcatgggagagaaaaaaaatttctaattgtgttgctgattactctgtgctctacaactcaacatttttttcaacctttaagtgctatggcgtttctgccactaagttgaatgatctttgcttctccaatgtctatgcagattcttttgtagtcaagggagatgatgtaagacaaatagcgccaggacaaactggtgttattgctgattataattataaattgccagatgatttcatgggttgtgtccttgcttggaatactaggaacattgatgctacttcaactggtaattataattataaatataggtatcttagacatggcaagcttaggccctttgagagagacatatctaatgtgcctttctcccctgatggcaaaccttgcaccccacctgctcttaattgttattggccattaaatgattatggtttttacaccactactggcattggctaccaaccttacagagttgtagtactttcttttgaacttttaaatgcaccggccacggtttgtggaccaaaattatccactgaccttattaagaaccagtgtgtcaattttaattttaatggactcactggtactggtgtgttaactccttcttcaaagagatttcaaccatttcaacaatttggccgtgatgtttctgatttcactgattccgttcgagatcctaaaacatctgaaatattagacatttcaccttgctcttttgggggtgtaagtgtaattacacctggaacaaatgcttcatctgaagttgctgttctatatcaagatgttaactgcactgatgtttctacagcaattcatgcagatcaactcacaccagcttggcgcatatattctactggaaacaatgtattccagactcaagcaggctgtcttataggagctgagcatgtcgacacttcttatgagtgcgacattcctattggagctggcatttgtgctagttaccatacagtttctttattacgtagtactagccaaaaatctattgtggcttatactatgtctttaggtgctgatagttcaattgcttactctaataacaccattgctatacctactaacttttcaattagcattactacagaagtaatgcctgtttctatggctaaaacctccgtagattgtaatatgtacatctgcggagattctactgaatgtgctaatttgcttctccaatatggtagcttttgcacacaactaaatcgtgcactctcaggtattgctgctgaacaggatcgcaacacacgtgaagtgttcgctcaagtcaaacaaatgtacaaaaccccaactttgaaatattttggtggttttaatttttcacaaatattacctgaccctctaaagccaactaagaggtcttttattgaggacttgctctttaataaggtgacactcgctgatgctggcttcatgaagcaatatggcgaatgcctaggtgatattaatgctagagatctcatttgtgcgcagaagttcaatggacttacagtgttgccacctctgctcactgatgatatgattgctgcctacactgctgctctagttagtggtactgccactgctggatggacatttggtgctggcgctgctcttcaaataccttttgctatgcaaatggcatataggttcaatggcattggagttacccaaaatgttctctatgagaaccaaaaacaaatcgccaaccaatttaacaaggcgattagtcaaattcaagaatcacttacaacaacatcaactgcattgggcaagctgcaagacgttgttaaccagaatgctcaagcattaaacacacttgttaaacaacttagctctaattttggtgcaatttcaagtgtgctaaatgatatcctttcgcgacttgataaagtcgaggcggaggtacaaattgacaggttaattacaggcagacttcaaagccttcaaacctatgtaacacaacaactaatcagggctgctgaaatcagggcttctgctaatcttgctgctactaaaatgtctgagtgtgttcttggacaatcaaaaagagttgacttttgtggaaagggctaccaccttatgtccttcccacaagcagccccgcatggtgttgtcttcctacatgtcacgtatgtgccatcccaggagaggaacttcaccacagcgccagcaatttgtcatgaaggcaaagcatacttccctcgtgaaggtgtttttgtgtttaatggcacttcttggtttattacacagaggaacttcttttctccacaaataattactacagacaatacatttgtctcaggaaattgtgatgtcgttattggcatcattaacaacacagtttatgatcctctgcaacctgagcttgactcattcaaagaagagctggacaagtacttcaaaaatcatacatcaccagatgttgatcttggcgacatttcaggcattaacgcttctgtcgtcaacattcaaaaagaaattgaccgcctcaatgaggtcgctaaaaatttaaatgaatcactcattgaccttcaagaattgggaaaatatgagcaatatattaaatggccttggtatgtttggctcggcttcattgctggactaattgccatcgtcatggttacaatcttgctttgttgcatgactagttgttgcagttgcctcaagggtgcatgctcttgtggttcttgctgcaagtttgatgaggatgactctgagccagttctcaagggtgtcaaattacattacacataaacgaacttatggatttgtttatgagattttttactcttggatcaattactgcacagccagtaaaaattgacaatgcttctcctgcaagtactgttcatgctacagcaacgataccgctacaagcctcactccctttcggatggcttgttattggcgttgcatttcttgctgtttttcagagcgctaccaaaataattgcgctcaataaaagatggcagctagccctttataagggcttccagttcatttgcaatttactgctgctatttgttaccatctattcacatcttttgcttgtcgctgcaggtatggaggcgcaatttttgtacctctatgccttgatatattttctacaatgcatcaacgcatgtagaattattatgagatgttggctttgttggaagtgcaaatccaagaacccattactttatgatgccaactactttgtttgctggcacacacataactatgactactgtataccatataacagtgtcacagatacaattgtcgttactgaaggtgacggcatttcaacaccaaaactcaaagaagactaccaaattggtggttattctgaggataggcactcaggtgttaaagactatgtcgttgtacatggctatttcaccgaagtttactaccagcttgagtctacacaaattactacagacactggtattgaaaatgctacattcttcatctttaacaagcttgttaaagacccaccgaatgtgcaaatacacacaatcgacggctcttcaggagttgctaatccagcaatggatccaatttatgatgagccgacgacgactactagcgtgcctttgtaagcacaagaaagtgagtacgaacttatgtactcattcgtttcggaagaaacaggtacgttaatagttaatagcgtacttctttttcttgctttcgtggtattcttgctagtcacactagccatccttactgcgcttcgattgtgtgcgtactgctgcaatattgttaacgtgagtttagtaaaaccaacggtttacgtctactcgcgtgttaaaaatctgaactcttctgaaggagttcctgatcttctggtctaaacgaactaactattattattattctgtttggaactttaacattgcttatcatggcagacaacggtactattaccgttgaggagcttaaacaactcctggaacaatggaacctagtaataggtttcctatgcctagcctggattatgttactacaatttgcctattctaatcggaacaggtttttgtacataataaagcttgttttcctctggctcttgtggccagtaacacttgcttgttttgtgcttgctgctgtctacagaattaattgggtgactggcgggattgcgattgcaatggcttgtattgtaggcttgatgtggcttagctacttcgttgcttccttcaggctgtttgctcgtacccgctcaatgtggtcattcaacccagaaacaaacattcttctcaatgtgcctctccgggggacaattgtgaccagaccgctcatggaaagtgaacttgtcattggtgctgtgatcattcgtggtcacttgcgaatggccggacactccctagggcgctgtgacattaaggacctgccaaaagagatcactgtggctacatcacgaacgctttcttattacaaattaggagcgtcgcagcgtgtaggcactgattcaggttttgctgcatacaaccgctaccgtattggaaactataaattaaatacagaccacgccggtagcaacgacaatattgctttgctagtacagtaagtgacaacagatgtttcatcttgttgacttccaggttacaatagcagagatattgattatcattatgaggactttcaggattgctatttggaatcttgacgttataataagttcaatagtgagacaattatttaagcctctaactaagaagaattattcggagttagatgatgaagaacctatggagttagattatccataaaacgaacatgaaaattattctcttcctgacattgattgtatttacatcttgcgagctatatcactatcaggagtgtgttagaggtacgactgtactactaaaagaaccttgcccatcaggaacatacgagggcaattcaccatttcaccctcttgctgacaataaatttgcactaacttgcactagcacacactttgcttttgcttgtgctgacggtactcgacatacctatcagctgcgtgcaagatcagtttcaccaaaacttttcatcagacaagaggaggttcaacaagagctctactcgccactttttctcattgttgctgctctagtatttttaatactttgcttcaccattaagagaaagacagaatgaatgagctcactttaattgacttctatttgtgctttttagcctttctgctattccttgttttaataatgcttattatattttggttttcactcgaaatccaggatctagaagaaccttgtaccaaagtctaaacgaacatgaaacttctcattgttttgacttgtatttctctatgcagttgcatatgcactgtagtacagcgctgtgcatctaataaacctcatgtgcttgaagatccttgtaaggtacaacactaggggtaatacttatagcactgcttggctttgtgctctaggaaaggttttaccttttcatagatggcacactatggttcaaacatgcacacctaatgttactatcaactgtcaagatccagctggtggtgcgcttatagctaggtgttggtaccttcatgaaggtcaccaaactgctgcatttagagacgtacttgttgttttaaataaacgaacaaattaaaatgtctgataatggaccccaatcaaaccaacgtagtgccccccgcattacatttggtggacccacagattcaactgacaataaccagaatggaggacgcaatggggcaaggccaaaacagcgccgaccccaaggtttacccaataatactgcgtcttggttcacagctctcactcagcatggcaaggaggaacttagattccctcgaggccagggcgttccaatcaacaccaatagtggtccagatgaccaaattggctactaccgaagagctacccgacgagttcgtggtggtgacggcaaaatgaaagagctcagccccagatggtacttctattacctaggaactggcccagaagcttcacttccctacggcgctaacaaagaaggcatcgtatgggttgcaactgagggagccttgaatacacccaaagaccacattggcacccgcaatcctaataacaatgctgccaccgtgctacaacttcctcaaggaacaacattgccaaaaggcttctacgcagagggaagcagaggcggcagtcaagcctcttctcgctcctcatcacgtagtcgcggtaattcaagaaattcaactcctggcagcagtaggggaaattctcctgctcgaatggctagcggaggtggtgaaactgccctcgcgctattgctgctagacagattgaaccagcttgagagcaaagtttctggtaaaggccaacaacaacaaggccaaactgtcactaagaaatctgctgctgaggcatctaaaaagcctcgccaaaaacgtactgccacaaaacagtacaacgtcactcaagcatttgggagacgtggtccagaacaaacccaaggaaatttcggggaccaagacctaatcagacaaggaactgattacaaacattggccgcaaattgcacaatttgctccaagtgcctctgcattctttggaatgtcacgcattggcatggaagtcacaccttcgggaacatggctgacttatcatggagccattaaattggatgacaaagatccacaattcaaagacaacgtcatactgctgaacaagcacattgacgcatacaaaacattcccaccaacagagcctaaaaaggacaaaaagaaaaagactgatgaagctcagcctttgccgcagagacaaaagaagcagcccactgtgactcttcttcctgcggctgacatggatgatttctccagacaacttcaaaattccatgagtggagcttctgctgattcaactcaggcataaacactcatgatgaccacacaaggcagatgggctatgtaaacgttttcgcaattccgtttacgatacatagtctactcttgtgcagaatgaattctcgtaactaaacagcacaagtaggtttagttaactttaatctcacatagcaatctttaatcaatgtgtaacattagggaggacttgaaagagccaccacattttcatcgaggccacgcggagtacgatcgagggtacagtgaataatgctagggagagct

SEQ ID NO: 29803 - DNA, 29573 bp, SARS Coronavirus
aactttaaaatctgtgtagctgtcgctcggctgcatgcctagtgcacctacgcagtataaacaataataaattttactgtcgttgacaagaaacgagtaactcgtccctcttctgcagactgcttacggtttcgtccgtgttgcagtcgatcatcagcatacctaggtttcgtccgggtgtgaccgaaaggtaagatggagagccttgttcttggtgtcaacgagaaaacacacgtccaactcagtttgcctgtccttcaggttagagacgtgctagtgcgtggcttcggggactctgtggaagaggccctatcggaggcacgtgaacacctcaaaaatggcacttgtggtctagtagagctggaaaaaggcgtactgccccagcttgaacagccctatgtgttcattaaacgttctgatgccttaagcaccaatcacggccacaaggtcgttgagctggttgcagaaatggacggcattcagtacggtcgtagcggtataacactgggagtactcgtgccacatgtgggcgaaaccccaattgcataccgcaatgttcttcttcgtaagaacggtaataagggagccggtggtcatagctatggcatcgatctaaagtcttatgacttaggtgacgagcttggcactgatcccattgaagattatgaacaaaactggaacactaagcatggcagtggtgcactccgtgaactcactcgtgagctcaatggaggtgcagtcactcgctatgtcgacaacaatttctgtggcccagatgggtaccctcttgattgcatcaaagattttctcgcacgcgcgggcaagtcaatgtgcactctttccgaacaacttgattacatcgagtcgaagagaggtgtctactgctgccgtgaccatgagcatgaaattgcctggttcactgagcgctctgataagagctacgagcaccagacacccttcgaaattaagagtgccaagaaatttgacactttcaaaggggaatgcccaaagtttgtgtttcctcttaactcaaaagtcaaagtcattcaaccacgtgttgaaaagaaaaagactgagggtttcatggggcgtatacgctctgtgtaccctgttgcatctccacaggagtgtaacaatatgcacttgtctaccttgatgaaatgtaatcattgcgatgaagtttcatggcagacgtgcgactttctgaaagccacttgtgaacattgtggcactgaaaatttagttattgaaggacctactacatgtgggtacctacctactaatgctgtagtgaaaatgccatgtcctgcctgtcaagacccagagattggacctgagcatagtgttgcagattatcacaaccactcaaacattgaaactcgactccgcaagggaggtaggactagatgttttggaggctgtgtgtttgcctatgttggctgctataataagcgtgcctactgggttcctcgtgctagtgctgatattggctcaggccatactggcattactggtgacaatgtggagaccttgaatgaggatctccttgagatactgagtcgtgaacgtgttaacattaacattgttggcgattttcatttgaatgaagaggttgccatcattttggcatctttctctgcttctacaagtgcctttattgacactataaagagtcttgattacaagtctttcaaaaccattgttgagtcctgcggtaactataaagttaccaagggaaagcccgtaaaaggtgcttggaacattggacaacagagatcagttttaacaccactgtgtggttttccctcacaggctgctggtgttatcagatcaatttttgcgcgcacacttgatgcagcaaaccactcaattcctgatttgcaaagagcagctgtcaccatacttgatggtatttctgaacagtcattacgtcttgtcgacgccatggtttatacttcagacctgctcaccaacagtgtcattattatggcatatgtaactggtggtcttgtacaacagacttctcagtggttgtctaatcttttgggcactactgttgaaaaactcaggcctatctttgaatggattgaggcgaaacttagtgcaggagttgaatttctcaaggatgcttgggagattctcaaatttctcattacaggtgtttttgacatcgtcaagggtcaaatacaggttgcttcagataacatcaaggattgtgtaaaatgcttcattgatgttgttaacaaggcactcgaaatgtgcattgatcaagtcactatcgctggcgcaaagttgcgatcactcaacttaggtgaagtcttcatcgctcaaagcaagggactttaccgtcagtgtatacgtggcaaggagcagctgcaactactcatgcctcttaaggcaccaaaagaagtaacctttcttgaaggtgattcacatgacacagtacttacctctgaggaggttgttctcaagaacggtgaactcgaagcactcgagacgcccgttgatagcttcacaaatggagctatcgttggcacaccagtctgtgtaaatggcctcatgctcttagagattaaggacaaagaacaatactgcgcattgtctcctggtttactggctacaaacaatgtctttcgcttaaaagggggtgcaccaattaaaggtgtaacctttggagaagatactgtttgggaagttcaaggttacaagaatgtgagaatcacatttgagcttgatgaacgtgttgacaaagtgcttaatgaaaagtgctctgtctacactgttgaatccggtaccgaagttactgagtttgcatgtgttgtagcagaggctgttgtgaagactttacaaccagtttctgatctccttaccaacatgggtattgatcttgatgagtggagtgtagctacattctacttatttgatgatgctggtgaagaaaacttttcatcacgtatgtattgttccttttaccctccagatgaggaagaagaggacgatgcagagtgtgaggaagaagaaattgatgaaacctgtgaacatgagtacggtacagaggatgattatcaaggtctccctctggaatttggtgcctcagctgaaacagttcgagttgaggaagaagaagaggaagactggctggatgatactactgagcaatcagagattgagccagaaccagaacctacacctgaagaaccagttaatcagtttactggttatttaaaacttactgacaatgttgccattaaatgtgttgacatcgttaaggaggcacaaagtgctaatcctatggtgattgtaaatgctgctaacatacacctgaaacatggtggtggtgtagcaggtgcactcaacaaggcaaccaatggtgccatgcaaaaggagagtgatgattacattaagctaaatggccctcttacagtaggagggtcttgtttgctttctggacataatcttgctaagaagtgtctgcatgttgttggacctaacctaaatgcaggtgaggacatccagcttcttaaggcagcatatgaaaatttcaattcacaggacatcttacttgcaccattgttgtcagcaggcatatttggtgctaaaccacttcagtctttacaagtgtgcgtgcagacggttcgtacacaggtttatattgcagtcaatgacaaagctctttatgagcaggttgtcatggattatcttgataacctgaagcctagagtggaagcacctaaacaagaggagccaccaaacacagaagattccaaaactgaggagaaatccgtcgtacagaagcctgtcgatgtgaagccaaaaattaaggcctgcattgatgaggttaccacaacactggaagaaactaagtttcttaccaataagttactcttgtttgctgatatcaatggtaagctttaccatgattctcagaacatgcttagaggtgaagatatgtctttccttgagaaggatgcaccttacatggtaggtgatgttatcactagtggtgatatcacttgtgttgtaataccctccaaaaaggctggtggcactactgagatgctctcaagagctttgaagaaagtgccagttgatgagtatataaccacgtaccctggacaaggatgtgctggttatacacttgaggaagctaagactgctcttaagaaatgcaaatctgcattttatgtactaccttcagaagcacctaatgctaaggaagagattctaggaactgtatcctggaatttgagagaaatgcttgctcatgctgaagagacaagaaaattaatgcctatatgcatggatgttagagccataatggcaaccatccaacgtaagtataaaggaattaaaattcaagagggcatcgttgactatggtgtccgattcttcttttatactagtaaagagcctgtagcttctattattacgaagctgaactctctaaatgagccgcttgtcacaatgccaattggttatgtgacacatggttttaatcttgaagaggctgcgcgctgtatgcgttctcttaaagctcctgccgtagtgtcagtatcatcaccagatgctgttactacatataatggatacctcacttcgtcatcaaagacatctgaggagcactttgtagaaacagtttctttggctggctcttacagagattggtcctattcaggacagcgtacagagttaggtgttgaatttcttaagcgtggtgacaaaattgtgtaccacactctggagagccccgtcgagtttcatcttgacggtgaggttctttcacttgacaaactaaagagtctcttatccctgcgggaggttaagactataaaagtgttcacaactgtggacaacactaatctccacacacagcttgtggatatgtctatgacatatggacagcagtttggtccaacatacttggatggtgctgatgttacaaaaattaaacctcatgtaaatcatgagggtaagactttctttgtactacctagtgatgacacactacgtagtgaagctttcgagtactaccatactcttgatgagagttttcttggtaggtacatgtctgctttaaaccacacaaagaaatggaaatttcctcaagttggtggtttaacttcaattaaatgggctgataacaattgttatttgtctagtgttttattagcacttcaacagcttgaagtcaaattcaatgcaccagcacttcaagaggcttattatagagcccgtgctggtgatgctgctaacttttgtgcactcatactcgcttacagtaataaaactgttggcgagcttggtgatgtcagagaaactatgacccatcttctacagcatgctaatttggaatctgcaaagcgagttcttaatgtggtgtgtaaacattgtggtcagaaaactactaccttaacgggtgtagaagctgtgatgtatatgggtactctatcttatgataatcttaagacaggtgtttccattccatgtgtgtgtggtcgtgatgctacacaatatctagtacaacaagagtcttcttttgttatgatgtctgcaccacctgctgagtataaattacagcaaggtacattcttatgtgcgaatgagtacactggtaactatcagtgtggtcattacactcatataactgctaaggagaccctctatcgtattgacggagctcaccttacaaagatgtcagagtacaaaggaccagtgactgatgttttctacaaggaaacatcttacactacaaccatcaagcctgtgtcgtataaactcgatggagttacttacacagagattgaaccaaaattggatgggtattataaaaaggataatgcttactatacagagcagcctatagaccttgtaccaactcaaccattaccaaatgcgagttttgataatttcaaactcacatgttctaacacaaaatttgctgatgatttaaatcaaatgacaggcttcacaaagccagcttcacgagagctatctgtcacattcttcccagacttgaatggcgatgtagtggctattgactatagacactattcagcgagtttcaagaaaggtgctaaattactgcataagccaattgtttggcacattaaccaggctacaaccaagacaacgttcaaaccaaacacttggtgtttacgttgtctttggagtacaaagccagtagatacttcaaattcatttgaagttctggcagtagaagacacacaaggaatggacaatcttgcttgtgaaagtcaacaacccacctctgaagaagtagtggaaaatcctaccatacagaaggaagtcatagagtgtgacgtgaaaactaccgaagttgtaggcaatgtcatacttaaaccatcagatgaaggtgttaaagtaacacaagagttaggtcatgaggatcttatggctgcttatgtggaaaacacaagcattaccattaagaaacctaatgagctttcactagccttaggtttaaaaacaattgccactcatggtattgctgcaattaatagtgttccttggagtaaaattttggcttatgtcaaaccattcttaggacaagcagcaattacaacatcaaattgcgctaagagattagcacaacgtgtgtttaacaattatatgccttatgtgtttacattattgttccaattgtgtacttttactaaaagtaccaattctagaattagagcttcactacctacaactattgctaaaaatagtgttaagagtgttgctaaattatgtttggatgccggcattaattatgtgaagtcacccaaattttctaaattgttcacaatcgctatgtggctattgttgttaagtatttgcttaggttctctaatctgtgtaactgctgcttttggtgtactcttatctaattttggtgctccttcttattgtaatggcgttagagaattgtatcttaattcgtctaacgttactactatggatttctgtgaaggttcttttccttgcagcatttgtttaagtggattagactcccttgattcttatccagctcttgaaaccattcaggtgacgatttcatcgtacaagctagacttgacaattttaggtctggccgctgagtgggttttggcatatatgttgttcacaaaattcttttatttattaggtctttcagctataatgcaggtgttctttggctattttgctagtcatttcatcagcaattcttggctcatgtggtttatcattagtattgtacaaatggcacccgtttctgcaatggttaggatgtacatcttctttgcttctttctactacatatggaagagctatgttcatatcatggatggttgcacctcttcgacttgcatgatgtgctataagcgcaatcgtgccacacgcgttgagtgtacaactattgttaatggcatgaagagatctttctatgtctatgcaaatggaggccgtggcttctgcaagactcacaattggaattgtctcaattgtgacacattttgcactggtagtacattcattagtgatgaagttgctcgtgatttgtcactccagtttaaaagaccaatcaaccctactgaccagtcatcgtatattgttgatagtgttgctgtgaaaaatggcgcgcttcacctctactttgacaaggctggtcaaaagacctatgagagacatccgctctcccattttgtcaatttagacaatttgagagctaacaacactaaaggttcactgcctattaatgtcatagtttttgatggcaagtccaaatgcgacgagtctgcttctaagtctgcttctgtgtactacagtcagctgatgtgccaacctattctgttgcttgaccaagttcttgtatcagacgttggagatagtactgaagtttccgttaagatgtttgatgcttatgtcgacaccttttcagcaacttttagtgttcctatggaaaaacttaaggcacttgttgctacagctcacagcgagttagcaaagggtgtagctttagatggtgtcctttctacattcgtgtcagctgcccgacaaggtgttgttgataccgatgttgacacaaaggatgttattgaatgtcttaaactttcacatcactctgacttagaagtgacaggtgacagttgtaacaatttcatgctcacctataataaggttgaaaacatgacgcccagagatcttggcgcatgtattgactgtaatgcaaggcatatcaatgcccaagtagcaaaaagtcacaatgtttcactcatctggaatgtaaaagactacatgtctttatctgaacagctgcgtaaacaaattcgtagtgctgccaagaagaacaacataccttttagactaacttgtgctacaactagacaggttgtcaatgtcataactactaaaatctcactcaagggtggtaagattgttagtacttgttttaaacttatgcttaaggccacattattgtgcgttcttgctgcattggtttgttatatcgttatgccagtacatacattgtcaatccatgatggttacacaaatgaaatcattggttacaaagccattcaggatggtgtcactcgtgacatcatttctactgatgattgttttgcaaataaacatgctggttttgacgcatggtttagccagcgtggtggttcatacaaaaatgacaaaagctgccctgtagtagctgctatcattacaagagagattggtttcatagtgcctggcttaccgggtactgtgctgagagcaatcaatggtgacttcttgcattttctacctcgtgtttttagtgctgttggcaacatttgctacacaccttccaaactcattgagtatagtgattttgctacctctgcttgcgttcttgctgctgagtgtacaatttttaaggatgctatgggcaaacctgtgccatattgttatgacactaatttgctagagggttctatttcttatagtgagcttcgtccagacactcgttatgtgcttatggatggttccatcatacagtttcctaacacttacctggagggttctgttagagtagtaacaacttttgatgctgagtactgtagacatggtacatgcgaaaggtcagaagtaggtatttgcctatctaccagtggtagatgggttcttaataatgagcattacagagctctatcaggagttttctgtggtgttgatgcgatgaatctcatagctaacatctttactcctcttgtgcaacctgtgggtgctttagatgtgtctgcttcagtagtggctggtggtattattgccatattggtgacttgtgctgcctactactttatgaaattcagacgtgtttttggtgagtacaaccatgttgttgctgctaatgcacttttgtttttgatgtctttcactatactctgtctggtaccagcttacagctttctgccgggagtctactcagtcttttacttgtacttgacattctatttcaccaatgatgtttcattcttggctcaccttcaatggtttgccatgttttctcctattgtgcctttttggataacagcaatctatgtattctgtatttctctgaagcactgccattggttctttaacaactatcttaggaaaagagtcatgtttaatggagttacatttagtaccttcgaggaggctgctttgtgtacctttttgctcaacaaggaaatgtacctaaaattgcgtagcgagacactgttgccacttacacagtataacaggtatcttgctctatataacaagtacaagtatttcagtggagccttagatactaccagctatcgtgaagcagcttgctgccacttagcaaaggctctaaatgactttagcaactcaggtgctgatgttctctaccaaccaccacagacatcaatcacttctgctgttctgcagagtggttttaggaaaatggcattcccgtcaggcaaagttgaagggtgcatggtacaagtaacctgtggaactacaactcttaatggattgtggttggatgacacagtatactgtccaagacatgtcatttgcacagcagaagacatgcttaatcctaactatgaagatctgctcattcgcaaatccaaccatagctttcttgttcaggctggcaatgttcaacttcgtgttattggccattctatgcaaaattgtctgcttaggcttaaagttgatacttctaaccctaagacacccaagtataaatttgtccgtatccaacctggtcaaacattttcagttctagcatgctacaatggttcaccatctggtgtttatcagtgtgccatgagacctaatcataccattaaaggttctttccttaatggatcatgtggtagtgttggttttaacattgattatgattgcgtgtctttctgctatatgcatcatatggagcttccaacaggagtacacgctggtactgacttagaaggtaaattctatggtccatttgttgacagacaaactgcacaggctgcaggtacagacacaaccataacattaaatgttttggcatggctgtatgctgctgttatcaatggtgataggtggtttcttaatagattcaccactactttgaatgactttaaccttgtggcaatgaagtacaactatgaacctttgacacaagatcatgttgacatattgggacctctttctgctcaaacaggaattgccgtcttagatatgtgtgctgctttgaaagagctgctgcagaatggtatgaatggtcgtactatccttggtagcactattttagaagatgagtttacaccatttgatgttgttagacaatgctctggtgttaccttccaaggtaagttcaagaaaattgttaagggcactcatcattggatgcttttaactttcttgacatcactattgattcttgttcaaagtacacagtggtcactgtttttctttgtttacgagaatgctttcttgccatttactcttggtattatggcaattgctgcatgtgctatgctgcttgttaagcataagcacgcattcttgtgcttgtttctgttaccttctcttgcaacagttgcttactttaatatggtctacatgcctgctagctgggtgatgcgtatcatgacatggcttgaattggctgacactagcttgtctggttataggcttaaggattgtgttatgtatgcttcagctttagttttgcttattctcatgacagctcgcactgtttatgatgatgctgctagacgtgtttggacactgatgaatgtcattacacttgtttacaaagtctactatggtaatgctttagatcaagctatttccatgtgggccttagttatttctgtaacctctaactattctggtgtcgttacgactatcatgtttttagctagagctatagtgtttgtgtgtgttgagtattatccattgttatttattactggcaacaccttacagtgtatcatgcttgtttattgtttcttaggctattgttgctgctgctactttggccttttctgtttactcaaccgttacttcaggcttactcttggtgtttatgactacttggtctctacacaagaatttaggtatatgaactcccaggggcttttgcctcctaagagtagtattgatgctttcaagcttaacattaagttgttgggtattggaggtaaaccatgtatcaaggttgctactgtacagtctaaaatgtctgacgtaaagtgcacatctgtggtactgctctcggttcttcaacaacttagagtagagtcatcttctaaattgtgggcacaatgtgtacaactccacaatgatattcttcttgcaaaagacacaactgaagctttcgagaagatggtttctcttttgtctgttttgctatccatgcagggtgctgtagacattaataggttgtgcgaggaaatgctcgataaccgtgctactcttcaggctattgcttcagaatttagttctttaccatcatatgccgcttatgccactgcccaggaggcctatgagcaggctgtagctaatggtgattctgaagtcgttctcaaaaagttaaagaaatctttgaatgtggctaaatctgagtttgaccgtgatgctgccatgcaacgcaagttggaaaagatggcagatcaggctatgacccaaatgtacaaacaggcaagatctgaggacaagagggcaaaagtaactagtgctatgcaaacaatgctcttcactatgcttaggaagcttgataatgatgcacttaacaacattatcaacaatgcgcgtgatggttgtgttccactcaacatcataccattgactacagcagccaaactcatggttgttgtccctgattatggtacctacaagaacacttgtgatggtaacacctttacatatgcatctgcactctgggaaatccagcaagttgttgatgcggatagcaagattgttcaacttagtgaaattaacatggacaattcaccaaatttggcttggcctcttattgttacagctctaagagccaactcagctgttaaactacagaataatgaactgagtccagtagcactacgacagatgtcctgtgcggctggtaccacacaaacagcttgtactgatgacaatgcacttgcctactataacaattcgaagggaggtaggtttgtgctggcattactatcagaccaccaagatctcaaatgggctagattccctaagagtgatggtacaggtacaatttacacagaactggaaccaccttgtaggtttgttacagacacaccaaaagggcctaaagtgaaatacttgtacttcatcaaaggcttaaacaacctaaatagaggtatggtgctgggcagtttagctgctacagtacgtcttcaggctggaaatgctacagaagtacctgccaattcaactgtgctttccttctgtgcttttgcagtagaccctgctaaagcatataaggattacctagcaagtggaggacaaccaatcaccaactgtgtgaagatgttgtgtacacatactggtacaggacaggcaattactgtaacaccagaagctaacatggaccaagagtcctttggtggtgcttcatgttgtctgtattgtagatgccacattgaccatccaaatcctaaaggattctgtgacttgaaaggtaagtacgtccaaatacctaccacttgtgctaatgacccagtgggttttacacttagaaacacagtctgtaccgtctgcggaatgtggaaaggttatggctgtagttgtgaccaactccgcgaacccttgatgcagtctgcggatgcatcaacgtttttaaacgggtttgcggtgtaagtgcagcccgtcttacaccgtgcggcacaggcactagtactgatgtcgtctacagggcttttgatatttacaacgaaaaagttgctggttttgcaaagttcctaaaaactaattgctgtcgcttccaggagaaggatgaggaaggcaatttattagactcttactttgtagttaagaggcatactatgtctaactaccaacatgaagagactatttataacttggttaaagattgtccagcggttgctgtccatgactttttcaagtttagagtagatggtgacatggtaccacatatatcacgtcagcgtctaactaaatacacaatggctgatttagtctatgctctacgtcattttgatgagggtaattgtgatacattaaaagaaatactcgtcacatacaattgctgtgatgatgattatttcaataagaaggattggtatgacttcgtagagaatcctgacatcttacgcgtatatgctaacttaggtgagcgtgtacgccaatcattattaaagactgtacaattctgcgatgctatgcgtgatgcaggcattgtaggcgtactgacattagataatcaggatcttaatgggaactggtacgatttcggtgatttcgtacaagtagcaccaggctgcggagttcctattgtggattcatattactcattgctgatgcccatcctcactttgactagggcattggctgctgagtcccatatggatgctgatctcgcaaaaccacttattaagtgggatttgctgaaatatgattttacggaagagagactttgtctcttcgaccgttattttaaatattgggaccagacataccatcccaattgtattaactgtttggatgataggtgtatccttcattgtgcaaactttaatgtgttattttctactgtgtttccacctacaagttttggaccactagtaagaaaaatatttgtagatggtgttccttttgttgtttcaactggataccattttcgtgagttaggagtcgtacataatcaggatgtaaacttacatagctcgcgtctcagtttcaaggaacttttagtgtatgctgctgatccagctatgcatgcagcttctggcaatttattgctagataaacgcactacatgcttttcagtagctgcactaacaaacaatgttgcttttcaaactgtcaaacccggtaattttaataaagacttttatgactttgctgtgtctaaaggtttctttaaggaaggaagttctgttgaactaaaacacttcttctttgctcaggatggcaacgctgctatcagtgattatgactattatcgttataatctgccaacaatgtgtgatatcagacaactcctattcgtagttgaagttgttgataaatactttgattgttacgatggtggctgtattaatgccaaccaagtaatcgttaacaatctggataaatcagctggtttcccatttaataaatggggtaaggctagactttattatgactcaatgagttatgaggatcaagatgcacttttcgcgtatactaagcgtaatgtcatccctactataactcaaatgaatcttaagtatgccattagtgcaaagaatagagctcgcaccgtagctggtgtctctatctgtagtactatgacaaatagacagtttcatcagaaattattgaagtcaatagccgccactagaggagctactgtggtaattggaacaagcaagttttacggtggctggcataatatgttaaaaactgtttacagtgatgtagaaactccacaccttatgggttgggattatccaaaatgtgacagagccatgcctaacatgcttaggataatggcctctcttgttcttgctcgcaaacataacacttgctgtaacttatcacaccgtttctacaggttagctaacgagtgtgcgcaagtattaagtgagatggtcatgtgtggcggctcactatatgttaaaccaggtggaacatcatccggtgatgctacaactgcttatgctaatagtgtctttaacatttgtcaagctgttacagccaatgtaaatgcacttctttcaactgatggtaataagatagctgacaagtatgtccgcaatctacaacacaggctctatgagtgtctctatagaaatagggatgttgatcatgaattcgtggatgagttttacgcttacctgcgtaaacatttctccatgatgattctttctgatgatgccgttgtgtgctataacagtaactatgcggctcaaggtttagtagctagcattaagaactttaaggcagttctttattatcaaaataatgtgttcatgtctgaggcaaaatgttggactgagactgaccttactaaaggacctcacgaattttgctcacagcatacaatgctagttaaacaaggagatgattacgtgtacctgccttacccagatccatcaagaatattaggcgcaggctgttttgtcgatgatattgtcaaaacagatggtacacttatgattgaaaggttcgtgtcactggctattgatgcttacccacttacaaaacatcctaatcaggagtatgctgatgtctttcacttgtatttacaatacattagaaagttacatgatgagcttactggccacatgttggacatgtattccgtaatgctaactaatgataacacctcacggtactgggaacctgagttttatgaggctatgtacacaccacatacagtcttgcaggctgtaggtgcttgtgtattgtgcaattcacagacttcacttcgttgcggtgcctgtattaggagaccattcctatgttgcaagtgctgctatgaccatgtcatttcaacatcacacaaattagtgttgtctgttaatccctatgtttgcaatgccccaggttgtgatgtcactgatgtgacacaactgtatctaggaggtatgagctattattgcaagtcacataagcctcccattagttttccattatgtgctaatggtcaggtttttggtttatacaaaaacacatgtgtaggcagtgacaatgtcactgacttcaatgcgatagcaacatgtgattggactaatgctggcgattacatacttgccaacacttgtactgagagactcaagcttttcgcagcagaaacgctcaaagccactgaggaaacatttaagctgtcatatggtattgccactgtacgcgaagtactctctgacagagaattgcatctttcatgggaggttggaaaacctagaccaccattgaacagaaactatgtctttactggttaccgtgtaactaaaaatagtaaagtacagattggagagtacacctttgaaaaaggtgactatggtgatgctgttgtgtacagaggtactacgacatacaagttgaatgttggtgattactttgtgttgacatctcacactgtaatgccacttagtgcacctactctagtgccacaagagcactatgtgagaattactggcttgtacccaacactcaacatctcagatgagttttctagcaatgttgcaaattatcaaaaggtcggcatgcaaaagtactctacactccaaggaccacctggtactggtaagagtcattttgccatcggacttgctctctattacccatctgctcgcatagtgtatacggcatgctctcatgcagctgttgatgccctatgtgaaaaggcattaaaatatttgcccatagataaatgtagtagaatcatacctgcgcgtgcgcgcgtagagtgttttgataaattcaaagtgaattcaacactagaacagtatgttttctgcactgtaaatgcattgccagaaacaactgctgacattgtagtctttgatgaaatctctatggctactaattatgacttgagtgttgtcaatgctagacttcgtgcaaaacactacgtctatattggcgatcctgctcaattaccagccccccgcacattgctgactaaaggcacactagaaccagaatattttaattcagtgtgcagacttatgaaaacaataggtccagacatgttccttggaacttgtcgccgttgtcctgctgaaattgttgacactgtgagtgctttagtttatgacaataagctaaaagcacacaaggataagtcagctcaatgcttcaaaatgttctacaaaggtgttattacacatgatgtttcatctgcaatcaacagacctcaaataggcgttgtaagagaatttcttacacgcaatcctgcttggagaaaagctgtttttatctcaccttataattcacagaacgctgtagcttcaaaaatcttaggattgcctacgcagactgttgattcatcacagggttctgaatatgactatgtcatattcacacaaactactgaaacagcacactcttgtaatgtcaaccgcttcaatgtggctatcacaagggcaaaaattggcattttgtgcataatgtctgatagagatctttatgacaaactgcaatttacaagtctagaaataccacgtcgcaatgtggctacattacaagcagaaaatgtaactggactttttaaggactgtagtaagatcattactggtcttcatcctacacaggcacctacacacctcagcgttgatataaagttcaagactgaaggattatgtgttgacataccaggcataccaaaggacatgacctaccgtagactcatctctatgatgggtttcaaaatgaattaccaagtcaatggttaccctaatatgtttatcacccgcgaagaagctattcgtcacgttcgtgcgtggattggctttgatgtagagggctgtcatgcaactagagatgctgtgggtactaacctacctctccagctaggattttctacaggtgttaacttagtagctgtaccgactggttatgttgacactgaaaataacacagaattcaccagagttaatgcaaaacctccaccaggtgaccagtttaaacatcttataccactcatgtataaaggcttgccctggaatgtagtgcgtattaagatagtacaaatgctcagtgatacactgaaaggattgtcagacagagtcgtgttcgtcctttgggcgcatggctttgagcttacatcaatgaagtactttgtcaagattggacctgaaagaacgtgttgtctgtgtgacaaacgtgcaacttgcttttctacttcatcagatacttatgcctgctggaatcattctgtgggttttgactatgtctataacccatttatgattgatgttcagcagtggggctttacgggtaaccttcagagtaaccatgaccaacattgccaggtacatggaaatgcacatgtggctagttgtgatgctatcatgactagatgtttagcagtccatgagtgctttgttaagcgcgttgattggtctgttgaataccctattataggagatgaactgagggttaattctgcttgcagaaaagtacaacacatggttgtgaagtctgcattgcttgctgataagtttccagttcttcatgacattggaaatccaaaggctatcaagtgtgtgcctcaggctgaagtagaatggaagttctacgatgctcagccatgtagtgacaaagcttacaaaatagaggagctcttctattcttatgctacacatcacgataaattcactgatggtgtttgtttgttttggaattgtaacgttgatcgttacccagccaatgcaattgtgtgtaggtttgacacaagagtcttgtcaaacttgaacttaccaggctgtgatggtggtagtttgtatgtgaataagcatgcattccacactccagctttcgataaaagtgcatttactaatttaaagcaattgcctttcttttactattctgatagtccttgtgagtctcatggcaaacaagtagtgtcggatattgattatgttccactcaaatctgctacgtgtattacacgatgcaatttaggtggtgctgtttgcagacaccatgcaaatgagtaccgacagtacttggatgcatataatatgatgatttctgctggatttagcctatggatttacaaacaatttgatacttataacctgtggaatacatttaccaggttacagagtttagaaaatgtggcttataatgttgttaataaaggacactttgatggacacgccggcgaagcacctgtttccatcattaataatgctgtttacacaaaggtagatggtattgatgtggagatctttgaaaataagacaacacttcctgttaatgttgcatttgagctttgggctaagcgtaacattaaaccagtgccagagattaagatactcaataatttgggtgttgatatcgctgctaatactgtaatctgggactacaaaagagaagccccagcacatgtatctacaataggtgtctgcacaatgactgacattgccaagaaacctactgagagtgcttgttcttcacttactgtcttgtttgatggtagagtggaaggacaggtagacctttttagaaacgcccgtaatggtgttttaataacagaaggttcagtcaaaggtctaacaccttcaaagggaccagcacaagctagcgtcaatggagtcacattaattggagaatcagtaaaaacacagtttaactactttaagaaagtagacggcattattcaacagttgcctgaaacctactttactcagagcagagacttagaggattttaagcccagatcacaaatggaaactgactttctcgagctcgctatggatgaattcatacagcgatataagctcgagggctatgccttcgaacacatcgtttatggagatttcagtcatggacaacttggcggtcttcatttaatgataggcttagccaagcgctcacaagattcaccacttaaattagaggattttatccctatggacagcacagtgaaaaattacttcataacagatgcgcaaacaggttcatcaaaatgtgtgtgttctgtgattgatcttttacttgatgactttgtcgagataataaagtcacaagatttgtcagtgatttcaaaagtggtcaaggttacaattgactatgctgaaatttcattcatgctttggtgtaaggatggacatgttgaaaccttctacccaaaactacaagcaagtcaagcgtggcaaccaggtgttgcgatgcctaacttgtacaagatgcaaagaatgcttcttgaaaagtgtgaccttcagaattatggtgaaaatgctgttataccaaaaggaataatgatgaatgtcgcaaagtatactcaactgtgtcaatacttaaatacacttactttagctgtaccctacaacatgagagttattcactttggtgctggctctgataaaggagttgcaccaggtacagctgtgctcagacaatggttgccaactggcacactacttgtcgattcagatcttaatgacttcgtctccgacgcagattctactttaattggagactgtgcaacagtacatacggctaataaatgggaccttattattagcgatatgtatgaccctaggaccaaacatgtgacaaaagagaatgactctaaagaagggtttttcacttatctgtgtggatttataaagcaaaaactagccctgggtggttctatagctgtaaagataacagagcattcttggaatgctgacctttacaagcttatgggccatttctcatggtggacagcttttgttacaaatgtaaatgcatcatcatcggaagcatttttaattggggctaactatcttggcaagccgaaggaacaaattgatggctataccatgcatgctaactacattttctggaggaacacaaatcctatccagttgtcttcctattcactctttgacatgagcaaatttcctcttaaattaagaggaactgctgtaatgtctcttaaggagaatcaaatcaatgatatgatttattctcttctggaaaaaggtaggcttatcattagagaaaacaacagagttgtggtttcaagtgatattcttgttaacaactaaacgaacatgtttattttcttattatttcttactctcactagtggtagtgaccttgaccggtgcaccacttttgatgatgttcaagctcctaattacactcaacatacttcatctatgaggggggtttactatcctgatgaaatttttagatcagacactctttatttaactcaggatttatttcttccattttattctaatgttacagggtttcatactattaatcatacgtttggcaaccctgtcataccttttaaggatggtatttattttgctgccacagagaaatcaaatgttgtccgtggttgggtttttggttctaccatgaacaacaagtcacagtcggtgattattattaacaattctactaatgttgttatacgagcatgtaactttgaattgtgtgacaaccctttctttgctgtttctaaacccatgggtacacagacacatactatgatattcgataatgcatttaattgcactttcgagtacatatctgatgccttttcgcttgatgtttcagaaaagtcaggtaattttaaacacttacgagagtttgtgtttaaaaataaagatgggtttctctatgtttataagggctatcaacctatagatgtagttcgtgatctaccttctggttttaacactttgaaacctatttttaagttgcctcttggtattaacattacaaattttagagccattcttacagccttttcacctgctcaagacatttggggcacgtcagctgcagcctattttgttggctatttaaagccaactacatttatgctcaagtatgatgaaaatggtacaatcacagatgctgttgattgttctcaaaatccacttgctgaactcaaatgctctgttaagagctttgagattgacaaaggaatttaccagacctctaatttcagggttgttccctcaggagatgttgtgagattccctaatattacaaacttgtgtccttttggagaggtttttaatgctactaaattcccttctgtctatgcatgggagagaaaaaaaatttctaattgtgttgctgattactctgtgctctacaactcaacatttttttcaacctttaagtgctatggcgtttctgccactaagttgaatgatctttgcttctccaatgtctatgcagattcttttgtagtcaagggagatgatgtaagacaaatagcgccaggacaaactggtgttattgctgattataattataaattgccagatgatttcatgggttgtgtccttgcttggaatactaggaacattgatgctacttcaactggtaattataattataaatataggtatcttagacatggcaagcttaggccctttgagagagacatatctaatgtgcctttctcccctgatggcaaaccttgcaccccacctgctcttaattgttattggccattaaatgattatggtttttacaccactactggcattggctaccaaccttacagagttgtagtactttcttttgaacttttaaatgcaccggccacggtttgtggaccaaaattatccactgaccttattaagaaccagtgtgtcaattttaattttaatggactcactggtactggtgtgttaactccttcttcaaagagatttcaaccatttcaacaatttggccgtgatgtttctgatttcactgattccgttcgagatcctaaaacatctgaaatattagacatttcaccttgctcttttgggggtgtaagtgtaattacacctggaacaaatgcttcatctgaagttgctgttctatatcaagatgttaactgcactgatgtttctacagcaattcatgcagatcaactcacaccagcttggcgcatatattctactggaaacaatgtattccagactcaagcaggctgtcttataggagctgagcatgtcgacacttcttatgagtgcgacattcctattggagctggcatttgtgctagttaccatacagtttctttattacgtagtactagccaaaaatctattgtggcttatactatgtctttaggtgctgatagttcaattgcttactctaataacaccattgctatacctactaacttttcaattagcattactacagaagtaatgcctgtttctatggctaaaacctccgtagattgtaatatgtacatctgcggagattctactgaatgtgctaatttgcttctccaatatggtagcttttgcacacaactaaatcgtgcactctcaggtattgctgctgaacaggatcgcaacacacgtgaagtgttcgctcaagtcaaacaaatgtacaaaaccccaactttgaaatattttggtggttttaatttttcacaaatattacctgaccctctaaagccaactaagaggtcttttattgaggacttgctctttaataaggtgacactcgctgatgctggcttcatgaagcaatatggcgaatgcctaggtgatattaatgctagagatctcatttgtgcgcagaagttcaatggacttacagtgttgccacctctgctcactgatgatatgattgctgcctacactgctgctctagttagtggtactgccactgctggatggacatttggtgctggcgctgctcttcaaataccttttgctatgcaaatggcatataggttcaatggcattggagttacccaaaatgttctctatgagaaccaaaaacaaatcgccaaccaatttaacaaggcgattagtcaaattcaagaatcacttacaacaacatcaactgcattgggcaagctgcaagacgttgttaaccagaatgctcaagcattaaacacacttgttaaacaacttagctctaattttggtgcaatttcaagtgtgctaaatgatatcctttcgcgacttgataaagtcgaggcggaggtacaaattgacaggttaattacaggcagacttcaaagccttcaaacctatgtaacacaacaactaatcagggctgctgaaatcagggcttctgctaatcttgctgctactaaaatgtctgagtgtgttcttggacaatcaaaaagagttgacttttgtggaaagggctaccaccttatgtccttcccacaagcagccccgcatggtgttgtcttcctacatgtcacgtatgtgccatcccaggagaggaacttcaccacagcgccagcaatttgtcatgaaggcaaagcatacttccctcgtgaaggtgtttttgtgtttaatggcacttcttggtttattacacagaggaacttcttttctccacaaataattactacagacaatacatttgtctcaggaaattgtgatgtcgttattggcatcattaacaacacagtttatgatcctctgcaacctgagcttgactcattcaaagaagagctggacaagtacttcaaaaatcatacatcaccagatgttgatcttggcgacatttcaggcattaacgcttctgtcgtcaacattcaaaaagaaattgaccgcctcaatgaggtcgctaaaaatttaaatgaatcactcattgaccttcaagaattgggaaaatatgagcaatatattaaatggccttggtatgtttggctcggcttcattgctggactaattgccatcgtcatggttacaatcttgctttgttgcatgactagttgttgcagttgcctcaagggtgcatgctcttgtggttcttgctgcaagtttgatgaggatgactctgagccagttctcaagggtgtcaaattacattacacataaacgaacttatggatttgtttatgagattttttactcttggatcaattactgcacagccagtaaaaattgacaatgcttctcctgcaagtactgttcatgctacagcaacgataccgctacaagcctcactccctttcggatggcttgttattggcgttgcatttcttgctgtttttcagagcgctaccaaaataattgcgctcaataaaagatggcagctagccctttataagggcttccagttcatttgcaatttactgctgctatttgttaccatctattcacatcttttgcttgtcgctgcaggtatggaggcgcaatttttgtacctctatgccttgatatattttctacaatgcatcaacgcatgtagaattattatgagatgttggctttgttggaagtgcaaatccaagaacccattactttatgatgccaactactttgtttgctggcacacacataactatgactactgtataccatataacagtgtcacagatacaattgtcgttactgaaggtgacggcatttcaacaccaaaactcaaagaagactaccaaattggtggttattctgaggataggcactcaggtgttaaagactatgtcgttgtacatggctatttcaccgaagtttactaccagcttgagtctacacaaattactacagacactggtattgaaaatgctacattcttcatctttaacaagcttgttaaagacccaccgaatgtgcaaatacacacaatcgacggctcttcaggagttgctaatccagcaatggatccaatttatgatgagccgacgacgactactagcgtgcctttgtaagcacaagaaagtgagtacgaacttatgtactcattcgtttcggaagaaacaggtacgttaatagttaatagcgtacttctttttcttgctttcgtggtattcttgctagttacactagccatccttactgcgcttcgattgtgtgcgtactgctgcaatattgttaacgtgagtttagtaaaaccaacggtttacgtctactcgcgtgttaaaaatctgaactcttctgaaggagttcctgatcttctggtctaaacgaactaactattattattattctgtttggaactttaacattgcttatcatggcagacaacggtactattaccgttgaggagcttaaacaactcctggaacaatggaacctagtaataggtttcctatgcctagcctggattatgttactacaatttgcctattctaatcggaacaggtttttgtacataataaagcttgttttcctctggctcttgtggccagtaacacttgcttgttttgtgcttgctgctgtctacagaattaattgggtgactggcgggattgcgattgcaatggcttgtattgtaggcttgatgtggcttagctacttcgttgcttccttcaggctgtttgctcgtacccgctcaatgtggtcattcaacccagaaacaaacattcttctcaatgtgcctctccgggggacaattgtgaccagaccgctcatggaaagtgaacttgtcattggtgctgtgatcattcgtggtcacttgcgaatggccggacactccctagggcgctgtgacattaaggacctgccaaaagagatcactgtggctacatcacgaacgctttcttattacaaattaggagcgtcgcagcgtgtaggcactgattcaggttttgctgcatacaaccgctaccgtattggaaactataaattaaatacagaccacgccggtagcaacgacaatattgctttgctagtacagtaagtgacaacagatgtttcatcttgttgacttccaggttacaatagcagagatattgattatcattatgaggactttcaggattgctatttggaatcttgacgttataataagttcaatagtgagacaattatttaagcctctaactaagaagaattattcggagttagatgatgaagaacctatggagttagattatccataaaacgaacatgaaaattattctcttcctgacattgattgtatttacatcttgcgagctatatcactatcaggagtgtgttagaggtacgactgtactactaaaagaaccttgcccatcaggaacatacgagggcaattcaccatttcaccctcttgctgacaataaatttgcactaacttgcactagcacacactttgcttttgcttgtgctgacggtactcgacatacctatcagctgcgtgcaagatcagtttcaccaaaacttttcatcagacaagaggaggttcaacaagagctctactcgccactttttctcattgttgctgctctagtatttttaatactttgcttcaccattaagagaaagacagaatgaatgagctcactttaattgacttctatttgtgctttttagcctttctgctattccttgttttaataatgcttattatattttggttttcactcgaaatccaggatctagaagaaccttgtaccaaagtctaaacgaacatgaaacttctcattgttttgacttgtatttctttatgcagttgcatatgcactgtagtacagcgctgtgcatctaataaacctcatgtgcttgaagatccttgtaaggtacaacactaggggtaatacttatagcactgcttggctttgtgctctaggaaaggttttaccttttcatagatggcacactatggttcaaacatgcacacctaatgttactatcaactgtcaagatccagctggtggtgcgcttatagctaggtgttggtaccttcatgaaggtcaccaaactgctgcatttagagacgtacttgttgttttaaataaacgaacaaattaaaatgtctgataatggaccccaatcaaaccaacgtagtgccccccgcattacatttggtggacccacagattcaactgacaataaccagaatggaggacgcaatggggcaaggccaaaacagcgccgaccccaaggtttacccaataatactgcgtcttggttcacagctctcactcagcatggcaaggaggaacttagattccctcgaggccagggcgttccaatcaacaccaatagtggtccagatgaccaaattggctactaccgaagagctacccgacgagttcgtggtggtgacggcaaaatgaaagagctcagccccagatggtacttctattacctaggaactggcccagaagcttcacttccctacggcgctaacaaagaaggcatcgtatgggttgcaactgagggagccttgaatacacccaaagaccacattggcacccgcaatcctaataacaatgctgccaccgtgctacaacttcctcaaggaacaacattgccaaaaggcttctacgcagagggaagcagaggcggcagtcaagcctcttctcgctcctcatcacgtagtcgcggtaattcaagaaattcaactcctggcagcagtaggggaaattctcctgctcgaatggctagcggaggtggtgaaactgccctcgcgctattgctgctagacagattgaaccagcttgagagcaaagtttctggtaaaggccaacaacaacaaggccaaactgtcactaagaaatctgctgctgaggcatctaaaaagcctcgccaaaaacgtactgccacaaaacagtacaacgtcactcaagcatttgggagacgtggtccagaacaaacccaaggaaatttcggggaccaagacctaatcagacaaggaactgattacaaacattggccgcaaattgcacaatttgctccaagtgcctctgcattctttggaatgtcacgcattggcatggaagtcacaccttcgggaacatggctgacttatcatggagccattaaattggatgacaaagatccacaattcaaagacaacgtcatactgctgaacaagcacattgacgcatacaaaacattcccaccaacagagcctaaaaaggacaaaaagaaaaagactgatgaagctcagcctttgccgcagagacaaaagaagcagcccactgtgactcttcttcctgcggctgacatggatgatttctccagacaacttcaaaattccatgagtggagcttctgctgattcaactcaggcataaacactcatgatgaccacacaaggcagatgggctatgtaaacgttttcgcaattccgtttacgatacatagtctactcttgtgcagaatgaattctcgtaactaaacagcacaagtaggtttagttaactttaatctcacatagcaatctttaatcaatgtgtaacattagggaggacttgaaagagccaccacattttcatcgaggccacgcggagtacgatcgagggtacagtgaataatgctagggagagct

SEQ ID NO: 29804 - DNA, 29736 bp, SARS Coronavirus
ctacccaggaaaagccaaccaacctcgatctcttgtagatctgttctctaaacgaactttaaaatctgtgtagctgtcgctcggctgcatgcctagtgcacctacgcagtataaacaataataaattttactgtcgttgacaagaaacgagtaactcgtccctcttctgcagactgcttacggtttcgtccgtgttgcagtcgatcatcagcatacctaggtttcgtccgggtgtgaccgaaaggtaagatggagagccttgttcttggtgtcaacgagaaaacacacgtccaactcagtttgcctgtccttcaggttagagacgtgctagtgcgtggcttcggggactctgtggaagaggccctatcggaggcacgtgaacacctcaaaaatggcacttgtggtctagtagagctggaaaaaggcgtactgccccagcttgaacagccctatgtgttcattaaacgttctgatgccttaagcaccaatcacggccacaaggtcgttgagctggttgcagaaatggacggcattcagtacggtcgtagcggtataacactgggagtactcgtgccacatgtgggcgaaaccccaattgcataccgcaatgttcttcttcgtaagaacggtaataagggagccggtggtcatagctatggcatcgatctaaagtcttatgacttaggtgacgagcttggcactgatcccattgaagattatgaacaaaactggaacactaagcatggcagtggtgcactccgtgaactcactcgtgagctcaatggaggtgcagtcactcgctatgtcgacaacaatttctgtggcccagatgggtaccctcttgattgcatcaaagattttctcgcacgcgcgggcaagtcaatgtgcactctttccgaacaacttgattacatcgagtcgaagagaggtgtctactgctgccgtgaccatgagcatgaaattgcctggttcactgagcgctctgataagagctacgagcaccagacacccttcgaaattaagagtgccaagaaatttgacactttcaaaggggaatgcccaaagtttgtgtttcctcttaactcaaaagtcaaagtcattcaaccacgtgttgaaaagaaaaagactgagggtttcatggggcgtatacgctctgtgtaccctgttgcatctccacaggagtgtaacaatatgcacttgtctaccttgatgaaatgtaatcattgcgatgaagtttcatggcagacgtgcgactttctgaaagccacttgtgaacattgtggcactgaaaatttagttattgaaggacctactacatgtgggtacctacctactaatgctgtagtgaaaatgccatgtcctgcctgtcaagacccagagattggacctgagcatagtgttgcagattatcacaaccactcaaacattgaaactcgactccgcaagggaggtaggactagatgttttggaggctgtgtgtttgcctatgttggctgctataataagcgtgcctactgggttcctcgtgctagtgctgatattggctcaggccatactggcattactggtgacaatgtggagaccttgaatgaggatctccttgagatactgagtcgtgaacgtgttaacattaacattgttggcgattttcatttgaatgaagaggttgccatcattttggcatctttctctgcttctacaagtgcctttattgacactataaagagtcttgattacaagtctttcaaaaccattgttgagtcctgcggtaactataaagttaccaagggaaagcccgtaaaaggtgcttggaacattggacaacagagatcagttttaacaccactgtgtggttttccctcacaggctgctggtgttatcagatcaatttttgcgcgcacacttgatgcagcaaaccactcaattcctgatttgcaaagagcagctgtcaccatacttgatggtatttctgaacagtcattacgtcttgtcgacgccatggtttatacttcagacctgctcaccaacagtgtcattattatggcatatgtaactggtggtcttgtacaacagacttctcagtggttgtctaatcttttgggcactactgttgaaaaactcaggcctatctttgaatggattgaggcgaaacttagtgcaggagttgaatttctcaaggatgcttgggagattctcaaatttctcattacaggtgtttttgacatcgtcaagggtcaaatacaggttgcttcagataacatcaaggattgtgtaaaatgcttcattgatgttgttaacaaggcactcgaaatgtgcattgatcaagtcactatcgctggcgcaaagttgcgatcactcaacttaggtgaagtcttcatcgctcaaagcaagggactttaccgtcagtgtatacgtggcaaggagcagctgcaactactcatgcctcttaaggcaccaaaagaagtaacctttcttgaaggtgattcacatgacacagtacttacctctgaggaggttgttctcaagaacggtgaactcgaagcactcgagacgcccgttgatagcttcacaaatggagctatcgttggcacaccagtctgtgtaaatggcctcatgctcttagagattaaggacaaagaacaatactgcgcattgtctcctggtttactggctacaaacaatgtctttcgcttaaaagggggtgcaccaattaaaggtgtaacctttggagaagatactgtttgggaagttcaaggttacaagaatgtgagaatcacatttgagcttgatgaacgtgttgacaaagtgcttaatgaaaagtgctctgtctacactgttgaatccggtaccgaagttactgagtttgcatgtgttgtagcagaggctgttgtgaagactttacaaccagtttctgatctccttaccaacatgggtattgatcttgatgagtggagtgtagctacattctacttatttgatgatgctggtgaagaaaacttttcatcacgtatgtattgttccttttaccctccagatgaggaagaagaggacgatgcagagtgtgaggaagaagaaattgatgaaacctgtgaacatgagtacggtacagaggatgattatcaaggtctccctctggaatttggtgcctcagctgaaacagttcgagttgaggaagaagaagaggaagactggctggatgatactactgagcaatcagagattgagccagaaccagaacctacacctgaagaaccagttaatcagtttactggttatttaaaacttactgacaatgttgccattaaatgtgttgacatcgttaaggaggcacaaagtgctaatcctatggtgattgtaaatgctgctaacatacacctgaaacatggtggtggtgtagcaggtgcactcaacaaggcaaccaatggtgccatgcaaaaggagagtgatgattacattaagctaaatggccctcttacagtaggagggtcttgtttgctttctggacataatcttgctaagaagtgtctgcatgttgttggacctaacctaaatgcaggtgaggacatccagcttcttaaggcagcatatgaaaatttcaattcacaggacatcttacttgcaccattgttgtcagcaggcatatttggtgctaaaccacttcagtctttacaagtgtgcgtgcagacggttcgtacacaggtttatattgcagtcaatgacaaagctctttatgagcaggttgtcatggattatcttgataacctgaagcctagagtggaagcacctaaacaagaggagccaccaaacacagaagattccaaaactgaggagaaatccgtcgtacagaagcctgtcgatgtgaagccaaaaattaaggcctgcattgatgaggttaccacaacactggaagaaactaagtttcttaccaataagttactcttgtttgctgatatcaatggtaagctttaccatgattctcagaacatgcttagaggtgaagatatgtctttccttgagaaggatgcaccttacatggtaggtgatgttatcactagtggtgatatcacttgtgttgtaataccctccaaaaaggctggtggcactactgagatgctctcaagagctttgaagaaagtgccagttgatgagtatataaccacgtaccctggacaaggatgtgctggttatacacttgaggaagctaagactgctcttaagaaatgcaaatctgcattttatgtactaccttcagaagcacctaatgctaaggaagagattctaggaactgtatcctggaatttgagagaaatgcttgctcatgctgaagagacaagaaaattaatgcctatatgcatggatgttagagccataatggcaaccatccaacgtaagtataaaggaattaaaattcaagagggcatcgttgactatggtgtccgattcttcttttatactagtaaagagcctgtagcttctattattacgaagctgaactctctaaatgagccgcttgtcacaatgccaattggttatgtgacacatggttttaatcttgaagaggctgcgcgctgtatgcgttctcttaaagctcctgccgtagtgtcagtatcatcaccagatgctgttactacatataatggatacctcacttcgtcatcaaagacatctgaggagcactttgtagaaacagtttctttggctggctcttacagagattggtcctattcaggacagcgtacagagttaggtgttgaatttcttaagcgtggtgacaaaattgtgtaccacactctggagagccccgtcgagtttcatcttgacggtgaggttctttcacttgacaaactaaagagtctcttatccctgcgggaggttaagactataaaagtgttcacaactgtggacaacactaatctccacacacagcttgtggatatgtctatgacatatggacagcagtttggtccaacatacttggatggtgctgatgttacaaaaattaaacctcatgtaaatcatgagggtaagactttctttgtactacctagtgatgacacactacgtagtgaagctttcgagtactaccatactcttgatgagagttttcttggtaggtacatgtctgctttaaaccacacaaagaaatggaaatttcctcaagttggtggtttaacttcaattaaatgggctgataacaattgttatttgtctagtgttttattagcacttcaacagcttgaagtcaaattcaatgcaccagcacttcaagaggcttattatagagcccgtgctggtgatgctgctaacttttgtgcactcatactcgcttacagtaataaaactgttggcgagcttggtgatgtcagagaaactatgacccatcttctacagcatgctaatttggaatctgcaaagcgagttcttaatgtggtgtgtaaacattgtggtcagaaaactactaccttaacgggtgtagaagctgtgatgtatatgggtactctatcttatgataatcttaagacaggtgtttccattccatgtgtgtgtggtcgtgatgctacacaatatctagtacaacaagagtcttcttttgttatgatgtctgcaccacctgctgagtataaattacagcaaggtacattcttatgtgcgaatgagtacactggtaactatcagtgtggtcattacactcatataactgctaaggagaccctctatcgtattgacggagctcaccttacaaagatgtcagagtacaaaggaccagtgactgatgttttctacaaggaaacatcttacactacaaccatcaagcctgtgtcgtataaactcgatggagttacttacacagagattgaaccaaaattggatgggtattataaaaaggataatgcttactatacagagcagcctatagaccttgtaccaactcaaccattaccaaatgcgagttttgataatttcaaactcacatgttctaacacaaaatttgctgatgatttaaatcaaatgacaggcttcacaaagccagcttcacgagagctatctgtcacattcttcccagacttgaatggcgatgtagtggctattgactatagacactattcagcgagtttcaagaaaggtgctaaattactgcataagccaattgtttggcacattaaccaggctacaaccaagacaacgttcaaaccaaacacttggtgtttacgttgtctttggagtacaaagccagtagatacttcaaattcatttgaagttctggcagtagaagacacacaaggaatggacaatcttgcttgtgaaagtcaacaacccacctctgaagaagtagtggaaaatcctaccatacagaaggaagtcatagagtgtgacgtgaaaactaccgaagttgtaggcaatgtcatacttaaaccatcagatgaaggtgttaaagtaacacaagagttaggtcatgaggatcttatggctgcttatgtggaaaacacaagcattaccattaagaaacctaatgagctttcactagccttaggtttaaaaacaattgccactcatggtattgctgcaattaatagtgttccttggagtaaaattttggcttatgtcaaaccattcttaggacaagcagcaattacaacatcaaattgcgctaagagattagcacaacgtgtgtttaacaattatatgccttatgtgtttacattattgttccaattgtgtacttttactaaaagtaccaattctagaattagagcttcactacctacaactattgctaaaaatagtgttaagagtgttgctaaattatgtttggatgccggcattaattatgtgaagtcacccaaattttctaaattgttcacaatcgctatgtggctattgttgttaagtatttgcttaggttctctaatctgtgtaactgctgcttttggtgtactcttatctaattttggtgctccttcttattgtaatggcgttagagaattgtatcttaattcgtctaacgttactactatggatttctgtgaaggttcttttccttgcagcatttgtttaagtggattagactcccttgattcttatccagctcttgaaaccattcaggtgacgatttcatcgtacaagctagacttgacaattttaggtctggccgctgagtgggttttggcatatatgttgttcacaaaattcttttatttattaggtctttcagctataatgcaggtgttctttggctattttgctagtcatttcatcagcaattcttggctcatgtggtttatcattagtattgtacaaatggcacccgtttctgcaatggttaggatgtacatcttctttgcttctttctactacatatggaagagctatgttcatatcatggatggttgcacctcttcgacttgcatgatgtgctataagcgcaatcgtgccacacgcgttgagtgtacaactattgttaatggcatgaagagatctttctatgtctatgcaaatggaggccgtggcttctgcaagactcacaattggaattgtctcaattgtgacacattttgcactggtagtacattcattagtgatgaagttgctcgtgatttgtcactccagtttaaaagaccaatcaaccctactgaccagtcatcgtatattgttgatagtgttgctgtgaaaaatggcgcgcttcacctctactttgacaaggctggtcaaaagacctatgagagacatccgctctcccattttgtcaatttagacaatttgagagctaacaacactaaaggttcactgcctattaatgtcatagtttttgatggcaagtccaaatgcgacgagtctgcttctaagtctgcttctgtgtactacagtcagctgatgtgccaacctattctgttgcttgaccaagctcttgtatcagacgttggagatagtactgaagtttccgttaagatgtttgatgcttatgtcgacaccttttcagcaacttttagtgttcctatggaaaaacttaaggcacttgttgctacagctcacagcgagttagcaaagggtgtagctttagatggtgtcctttctacattcgtgtcagctgcccgacaaggtgttgttgataccgatgttgacacaaaggatgttattgaatgtctcaaactttcacatcactctgacttagaagtgacaggtgacagttgtaacaatttcatgctcacctataataaggttgaaaacatgacgcccagagatcttggcgcatgtattgactgtaatgcaaggcatatcaatgcccaagtagcaaaaagtcacaatgtttcactcatctggaatgtaaaagactacatgtctttatctgaacagctgcgtaaacaaattcgtagtgctgccaagaagaacaacataccttttagactaacttgtgctacaactagacaggttgtcaatgtcataactactaaaatctcactcaagggtggtaagattgttagtacttgttttaaacttatgcttaaggccacattattgtgcgttcttgctgcattggtttgttatatcgttatgccagtacatacattgtcaatccatgatggttacacaaatgaaatcattggttacaaagccattcaggatggtgtcactcgtgacatcatttctactgatgattgttttgcaaataaacatgctggttttgacgcatggtttagccagcgtggtggttcatacaaaaatgacaaaagctgccctgtagtagctgctatcattacaagagagattggtttcatagtgcctggcttaccgggtactgtgctgagagcaatcaatggtgacttcttgcattttctacctcgtgtttttagtgctgttggcaacatttgctacacaccttccaaactcattgagtatagtgattttgctacctctgcttgcgttcttgctgctgagtgtacaatttttaaggatgctatgggcaaacctgtgccatattgttatgacactaatttgctagagggttctatttcttatagtgagcttcgtccagacactcgttatgtgcttatggatggttccatcatacagtttcctaacacttacctggagggttctgttagagtagtaacaacttttgatgctgagtactgtagacatggtacatgcgaaaggtcagaagtaggtatttgcctatctaccagtggtagatgggttcttaataatgagcattacagagctctatcaggagttttctgtggtgttgatgcgatgaatctcatagctaacatctttactcctcttgtgcaacctgtgggtgctttagatgtgtctgcttcagtagtggctggtggtattattgccatattggtgacttgtgctgcctactactttatgaaattcagacgtgtttttggtgagtacaaccatgttgttgctgctaatgcacttttgtttttgatgtctttcactatactctgtctggtaccagcttacagctttctgccgggagtctactcagtcttttacttgtacttgacattctatttcaccaatgatgtttcattcttggctcaccttcaatggtttgccatgttttctcctattgtgcctttttggataacagcaatctatgtattctgtatttctctgaagcactgccattggttctttaacaactatcttaggaaaagagtcatgtttaatggagttacatttagtaccttcgaggaggctgctttgtgtacctttttgctcaacaaggaaatgtacctaaaattgcgtagcgagacactgttgccacttacacagtataacaggtatcttgctctatataacaagtacaagtatttcagtggagccttagatactaccagctatcgtgaagcagcttgctgccacttagcaaaggctctaaatgactttagcaactcaggtgctgatgttctctaccaaccaccacagacatcaatcacttctgctgttctgcagagtggttttaggaaaatggcattcccgtcaggcaaagttgaagggtgcatggtacaagtaacctgtggaactacaactcttaatggattgtggttggatgacacagtatactgtccaagacatgtcatttgcacagcagaagacatgcttaatcctaactatgaagatctgctcattcgcaaatccaaccatagctttcttgttcaggctggcaatgttcaacttcgtgttattggccattctatgcaaaattgtctgcttaggcttaaagttgatacttctaaccctaagacacccaagtataaatttgtccgtatccaacctggtcaaacattttcagttctagcatgctacaatggttcaccatctggtgtttatcagtgtgccatgagacctaatcataccattaaaggttctttccttaatggatcatgtggtagtgttggttttaacattgattatgattgcgtgtctttctgctatatgcatcatatggagcttccaacaggagtacacgctggtactgacttagaaggtaaattctatggtccatttgttgacagacaaactgcacaggctgcaggtacagacacaaccataacattaaatgttttggcatggctgtatgctgctgttatcaatggtgataggtggtttcttaatagattcaccactactttgaatgactttaaccttgtggcaatgaagtacaactatgaacctttgacacaagatcatgttgacatattgggacctctttctgctcaaacaggaattgccgtcttagatatgtgtgctgctttgaaagagctgctgcagaatggtatgaatggtcgtactatccttggtagcactattttagaagatgagtttacaccatttgatgttgttagacaatgctctggtgttaccttccaaggtaagttcaagaaaattgttaagggcactcatcattggatgcttttaactttcttgacatcactattgattcttgttcaaagtacacagtggtcactgtttttctttgtttacgagaatgctttcttgccatttactcttggtattatggcaattgctgcatgtgctatgctgcttgttaagcataagcacgcattcttgtgcttgtttctgttaccttctcttgcaacagttgcttactttaatatggtctacatgcctgctagctgggtgatgcgtatcatgacatggcttgaattggctgacactagcttgtctggttataggcttaaggattgtgttatgtatgcttcagctttagttttgcttattctcatgacagctcgcactgtttatgatgatgctgctagacgtgtttggacactgatgaatgtcattacacttgtttacaaagtctactatggtaatgctttagatcaagctatttccatgtgggccttagttatttctgtaacctctaactattctggtgtcgttacgactatcatgtttttagctagagctatagtgtttgtgtgtgttgagtattatccattgttatttattactggcaacaccttacagtgtatcatgcttgtttattgtttcttaggctattgttgctgctgctactttggccttttctgtttactcaaccgttacttcaggcttactcttggtgtttatgactacttggtctctacacaagaatttaggtatatgaactcccaggggcttttgcctcctaagagtagtattgatgctttcaagcttaacattaagttgttgggtattggaggtaaaccatgtatcaaggttgctactgtacagtctaaaatgtctgacgtaaagtgcacatctgtggtactgctctcggttcttcaacaacttagagtagagtcatcttctaaattgtgggcacaatgtgtacaactccacaatgatattcttcttgcaaaagacacaactgaagctttcgagaagatggtttctcttttgtctgttttgctatccatgcagggtgctgtagacattaataggttgtgcgaggaaatgctcgataaccgtgctactcttcaggctattgcttcagaatttagttctttaccatcatatgccgcttatgccactgcccaggaggcctatgagcaggctgtagctaatggtgattctgaagtcgttctcaaaaagttaaagaaatctttgaatgtggctaaatctgagtttgaccgtgatgctgccatgcaacgcaagttggaaaagatggcagatcaggctatgacccaaatgtacaaacaggcaagatctgaggacaagagggcaaaagtaactagtgctatgcaaacaatgctcttcactatgcttaggaagcttgataatgatgcacttaacaacattatcaacaatgcgcgtgatggttgtgttccactcaacatcataccattgactacagcagccaaactcatggttgttgtccctgattatggtacctacaagaacacttgtgatggtaacacctttacatatgcatctgcactctgggaaatccagcaagttgttgatgcggatagcaagattgttcaacttagtgaaattaacatggacaattcaccaaatttggcttggcctcttattgttacagctctaagagccaactcagctgttaaactacagaataatgaactgagtccagtagcactacgacagatgtcctgtgcggctggtaccacacaaacagcttgtactgatgacaatgcacttgcctactataacaattcgaagggaggtaggtttgtgctggcattactatcagaccaccaagatctcaaatgggctagattccctaagagtgatggtacaggtacaatttacacagaactggaaccaccttgtaggtttgttacagacacaccaaaagggcctaaagtgaaatacttgtacttcatcaaaggcttaaacaacctaaatagaggtatggtgctgggcagtttagctgctacagtacgtcttcaggctggaaatgctacagaagtacctgccaattcaactgtgctttccttctgtgcttttgcagtagaccctgctaaagcatataaggattacctagcaagtggaggacaaccaatcaccaactgtgtgaagatgttgtgtacacacactggtacaggacaggcaattactgtaacaccagaagctaacatggaccaagagtcctttggtggtgcttcatgttgtctgtattgtagatgccacattgaccatccaaatcctaaaggattctgtgacttgaaaggtaagtacgtccaaatacctaccacttgtgctaatgacccagtgggttttacacttagaaacacagtctgtaccgtctgcggaatgtggaaaggttatggctgtagttgtgaccaactccgcgaacccttgatgcagtctgcggatgcatcaacgtttttaaacgggtttgcggtgtaagtgcagcccgtcttacaccgtgcggcacaggcactagtactgatgtcgtctacagggcttttgatatttacaacgaaaaagttgctggttttgcaaagttcctaaaaactaattgctgtcgcttccaggagaaggatgaggaaggcaatttattagactcttactttgtagttaagaggcatactatgtctaactaccaacatgaagagactatttataacttggttaaagattgtccagcggttgctgtccatgactttttcaagtttagagtagatggtgacatggtaccacatatatcacgtcagcgtctaactaaatacacaatggctgatttagtctatgctctacgtcattttgatgagggtaattgtgatacattaaaagaaatactcgtcacatacaattgctgtgatgatgattatttcaataagaaggattggtatgacttcgtagagaatcctgacatcttacgcgtatatgctaacttaggtgagcgtgtacgccaatcattattaaagactgtacaattctgcgatgctatgcgtgatgcaggcattgtaggcgtactgacattagataatcaggatcttaatgggaactggtacgatttcggtgatttcgtacaagtagcaccaggctgcggagttcctattgtggattcatattactcattgctgatgcccatcctcactttgactagggcattggctgctgagtcccatatggatgctgatctcgcaaaaccacttattaagtgggatttgctgaaatatgattttacggaagagagactttgtctcttcgaccgttattttaaatattgggaccagacataccatcccaattgtattaactgtttggatgataggtgtatccttcattgtgcaaactttaatgtgttattttctactgtgtttccacctacaagttttggaccactagtaagaaaaatatttgtagatggtgttccttttgttgtttcaactggataccattttcgtgagttaggagtcgtacataatcaggatgtaaacttacatagctcgcgtctcagtttcaaggaacttttagtgtatgctgctgatccagctatgcatgcagcttctggcaatttattgctagataaacgcactacatgcttttcagtagctgcactaacaaacaatgttgcttttcaaactgtcaaacccggtaattttaataaagacttttatgactttgctgtgtctaaaggtttctttaaggaaggaagttctgttgaactaaaacacttcttctttgctcaggatggcaacgctgctatcagtgattatgactattatcgttataatctgccaacaatgtgtgatatcagacaactcctattcgtagttgaagttgttgataaatactttgattgttacgatggtggctgtattaatgccaaccaagtaatcgttaacaatctggataaatcagctggtttcccatttaataaatggggtaaggctagactttattatgactcaatgagttatgaggatcaagatgcacttttcgcgtatactaagcgtaatgtcatccctactataactcaaatgaatcttaagtatgccattagtgcaaagaatagagctcgcaccgtagctggtgtctctatctgtagtactatgacaaatagacagtttcatcagaaattattgaagtcaatagccgccactagaggagctactgtggtaattggaacaagcaagttttacggtggctggcataatatgttaaaaactgtttacagtgatgtagaaactccacaccttatgggttgggattatccaaaatgtgacagagccatgcctaacatgcttaggataatggcctctcttgttcttgctcgcaaacataacacttgctgtaacttatcacaccgtttctacaggttagctaacgagtgtgcgcaagtattaagtgagatggtcatgtgtggcggctcactatatgttaaaccaggtggaacatcatccggtgatgctacaactgcttatgctaatagtgtctttaacatttgtcaagctgttacagccaatgtaaatgcacttctttcaactgatggtaataagatagctgacaagtatgtccgcaatctacaacacaggctctatgagtgtctctatagaaatagggatgttgatcatgaattcgtggatgagttttacgcttacctgcgtaaacatttctccatgatgattctttctgatgatgccgttgtgtgctataacagtaactatgcggctcaaggtttagtagctagcattaagaactttaaggcagttctttattatcaaaataatgtgttcatgtctgaggcaaaatgttggactgagactgaccttactaaaggacctcacgaattttgctcacagcatacaatgctagttaaacaaggagatgattacgtgtacctgccttacccagatccatcaagaatattaggcgcaggctgttttgtcgatgatattgtcaaaacagatggtacacttatgattgaaaggttcgtgtcactggctattgatgcttacccacttacaaaacatcctaatcaggagtatgctgatgtctttcacttgtatttacaatacattagaaagttacatgatgagcttactggccacatgttggacatgtattccgtaatgctaactaatgataacacctcacggtactgggaacctgagttttatgaggctatgtacacaccacatacagtcttgcaggctgtaggtgcttgtgtattgtgcaattcacagacttcacttcgttgcggtgcctgtattaggagaccattcctatgttgcaagtgctgctatgaccatgtcatttcaacatcacacaaattagtgttgtctgttaatccctatgtttgcaatgccccaggttgtgatgtcactgatgtgacacaactgtatctaggaggtatgagctattattgcaagtcacataagcctcccattagttttccattatgtgctaatggtcaggtttttggtttatacaaaaacacatgtgtaggcagtgacaatgtcactgacttcaatgcgatagcaacatgtgattggactaatgctggcgattacatacttgccaacacttgtactgagagactcaagcttttcgcagcagaaacgctcaaagccactgaggaaacatttaagctgtcatatggtattgccactgtacgcgaagtactctctgacagagaattgcatctttcatgggaggttggaaaacctagaccaccattgaacagaaactatgtctttactggttaccgtgtaactaaaaatagtaaagtacagattggagagtacacctttgaaaaaggtgactatggtgatgctgttgtgtacagaggtactacgacatacaagttgaatgttggtgattactttgtgttgacatctcacactgtaatgccacttagtgcacctactctagtgccacaagagcactatgtgagaattactggcttgtacccaacactcaacatctcagatgagttttctagcaatgttgcaaattatcaaaaggtcggcatgcaaaagtactctacactccaaggaccacctggtactggtaagagtcattttgccatcggacttgctctctattacccatctgctcgcatagtgtatacggcatgctctcatgcagctgttgatgccctatgtgaaaaggcattaaaatatttgcccatagataaatgtagtagaatcatacctgcgcgtgcgcgcgtagagtgttttgataaattcaaagtgaattcaacactagaacagtatgttttctgcactgtaaatgcattgccagaaacaactgctgacattgtagtctttgatgaaatctctatggctactaattatgacttgagtgttgtcaatgctagacttcgtgcaaaacactacgtctatattggcgatcctgctcaattaccagccccccgcacattgctgactaaaggcacactagaaccagaatattttaattcagtgtgcagacttatgaaaacaataggtccagacatgttccttggaacttgtcgccgttgtcctgctgaaattgttgacactgtgagtgctttagtttatgacaataagctaaaagcacacaaggataagtcagctcaatgcttcaaaatgttctacaaaggtgttattacacatgatgtttcatctgcaatcaacagacctcaaataggcgttgtaagagaatttcttacacgcaatcctgcttggagaaaagctgtttttatctcaccttataattcacagaacgctgtagcttcaaaaatcttaggattgcctacgcagactgttgattcatcacagggttctgaatatgactatgtcatattcacacaaactactgaaacagcacactcttgtaatgtcaaccgcttcaatgtggctatcacaagggcaaaaattggcattttgtgcataatgtctgatagagatctttatgacaaactgcaatttacaagtctagaaataccacgtcgcaatgtggctacattacaagcagaaaatgtaactggactttttaaggactgtagtaagatcattactggtcttcatcctacacaggcacctacacacctcagcgttgatataaagttcaagactgaaggattatgtgttgacataccaggcataccaaaggacatgacctaccgtagactcatctctatgatgggtttcaaaatgaattaccaagtcaatggttaccctaatatgtttatcacccgcgaagaagctattcgtcacgttcgtgcgtggattggctttgatgtagagggctgtcatgcaactagagatgctgtgggtactaacctacctctccagctaggattttctacaggtgttaacttagtagctgtaccgactggttatgttgacactgaaaataacacagaattcaccagagttaatgcaaaacctccaccaggtgaccagtttaaacatcttataccactcatgtataaaggcttgccctggaatgtagtgcgtattaagatagtacaaatgctcagtgatacactgaaaggattgtcagacagagtcgtgttcgtcctttgggcgcatggctttgagcttacatcaatgaagtactttgtcaagattggacctgaaagaacgtgttgtctgtgtgacaaacgtgcaacttgcttttctacttcatcagatacttatgcctgctggaatcattctgtgggttttgactatgtctataacccatttatgattgatgttcagcagtggggctttacgggtaaccttcagagtaaccatgaccaacattgccaggtacatggaaatgcacatgtggctagttgtgatgctatcatgactagatgtttagcagtccatgagtgctttgttaagcgcgttgattggtctgttgaataccctattataggagatgaactgagggttaattctgcttgcagaaaagtacaacacatggttgtgaagtctgcattgcttgctgataagtttccagttcttcatgacattggaaatccaaaggctatcaagtgtgtgcctcaggctgaagtagaatggaagttctacgatgctcagccatgtagtgacaaagcttacaaaatagaggaactcttctattcttatgctacacatcacgataaattcactgatggtgtttgtttgttttggaattgtaacgttgatcgttacccagccaatgcaattgtgtgtaggtttgacacaagagtcttgtcaaacttgaacttaccaggctgtgatggtggtagtttgtatgtgaataagcatgcattccacactccagctttcgataaaagtgcatttactaatttaaagcaattgcctttcttttactattctgatagtccttgtgagtctcatggcaaacaagtagtgtcggatattgattatgttccactcaaatctgctacgtgtattacacgatgcaatttaggtggtgctgtttgcagacaccatgcaaatgagtaccgacagtacttggatgcatataatatgatgatttctgctggatttagcctatggatttacaaacaatttgatacttataacctgtggaatacatttaccaggttacagagtttagaaaatgtggcttataatgttgttaataaaggacactttgatggacacgccggcgaagcacctgtttccatcattaataatgctgtttacacaaaggtagatggtattgatgtggagatctttgaaaataagacaacacttcctgttaatgttgcatttgagctttgggctaagcgtaacattaaaccagtgccagagattaagatactcaataatttgggtgttgatatcgctgctaatactgtaatctgggactacaaaagagaagccccagcacatgtatctacaataggtgtctgcacaatgactgacattgccaagaaacctactgagagtgcttgttcttcacttactgtcttgtttgatggtagagtggaaggacaggtagacctttttagaaacgcccgtaatggtgttttaataacagaaggttcagtcaaaggtctaacaccttcaaagggaccagcacaagctagcgtcaatggagtcacattaattggagaatcagtaaaaacacagtttaactactttaagaaagtagacggcattattcaacagttgcctgaaacctactttactcagagcagagacttagaggattttaagcccagatcacaaatggaaactgactttctcgagctcgctatggatgaattcatacagcgatataagctcgagggctatgccttcgaacacatcgtttatggagatttcagtcatggacaacttggcggtcttcatttaatgataggcttagccaagcgctcacaagattcaccacttaaattagaggattttatccctatggacagcacagtgaaaaattacttcataacagatgcgcaaacaggttcatcaaaatgtgtgtgttctgtgattgatcttttacttgatgactttgtcgagataataaagtcacaagatttgtcagtgatttcaaaagtggtcaaggttacaattgactatgctgaaatttcattcatgctttggtgtaaggatggacatgttgaaaccttctacccaaaactacaagcaagtcaagcgtggcaaccaggtgttgcgatgcctaacttgtacaagatgcaaagaatgcttcttgaaaagtgtgaccttcagaattatggtgaaaatgctgttataccaaaaggaataatgatgaatgtcgcaaagtatactcaactgtgtcaatacttaaatacacttactttagctgtaccctacaacatgagagttattcactttggtgctggctctgataaaggagttgcaccaggtacagctgtgctcagacaatggttgccaactggcacactacttgtcgattcagatcttaatgacttcgtctccgacgcagattctactttaattggagactgtgcaacagtacatacggctaataaatgggaccttattattagcgatatgtatgaccctaggaccaaacatgtgacaaaagagaatgactctaaagaagggtttttcacttatctgtgtggatttataaagcaaaaactagccctgggtggttctatagctgtaaagataacagagcattcttggaatgctgacctttacaagcttatgggccatttctcatggtggacagcttttgttacaaatgtaaatgcatcatcatcggaagcatttttaattggggctaactatcttggcaagccgaaggaacaaattgatggctataccatgcatgctaactacattttctggaggaacacaaatcctatccagttgtcttcctattcactctttgacatgagcaaatttcctcttaaattaagaggaactgctgtaatgtctcttaaggagaatcaaatcaatgatatgatttattctcttctggaaaaaggtaggcttatcattagagaaaacaacagagttgtggtttcaagtgatattcttgttaacaactaaacgaacatgtttattttcttattatttcttactctcactagtggtagtgaccttgaccggtgcaccacttttgatgatgttcaagctcctaattacactcaacatacttcatctatgaggggggtttactatcctgatgaaatttttagatcagacactctttatttaactcaggatttatttcttccattttattctaatgttacagggtttcatactattaatcatacgtttggcaaccctgtcataccttttaaggatggtatttattttgctgccacagagaaatcaaatgttgtccgtggttgggtttttggttctaccatgaacaacaagtcacagtcggtgattattattaacaattctactaatgttgttatacgagcatgtaactttgaattgtgtgacaaccctttctttgctgtttctaaacccatgggtacacagacacatactatgatattcgataatgcatttaattgcactttcgagtacatatctgatgccttttcgcttgatgtttcagaaaagtcaggtaattttaaacacttacgagagtttgtgtttaaaaataaagatgggtttctctatgtttataagggctatcaacctatagatgtagttcgtgatctaccttctggttttaacactttgaaacctatttttaagttgcctcttggtattaacattacaaattttagagccattcttacagccttttcacctgctcaagacatttggggcacgtcagctgcagcctattttgttggctatttaaagccaactacatttatgctcaagtatgatgaaaatggtacaatcacagatgctgttgattgttctcaaaatccacttgctgaactcaaatgctctgttaagagctttgagattgacaaaggaatttaccagacctctaatttcagggttgttccctcaggagatgttgtgagattccctaatattacaaacttgtgtccttttggagaggtttttaatgctactaaattcccttctgtctatgcatgggagagaaaaaaaatttctaattgtgttgctgattactctgtgctctacaactcaacatttttttcaacctttaagtgctatggcgtttctgccactaagttgaatgatctttgcttctccaatgtctatgcagattcttttgtagtcaagggagatgatgtaagacaaatagcgccaggacaaactggtgttattgctgattataattataaattgccagatgatttcatgggttgtgtccttgcttggaatactaggaacattgatgctacttcaactggtaattataattataaatataggtatcttagacatggcaagcttaggccctttgagagagacatatctaatgtgcctttctcccctgatggcaaaccttgcaccccacctgctcttaattgttattggccattaaatgattatggtttttacaccactactggcattggctaccaaccttacagagttgtagtactttcttttgaacttttaaatgcaccggccacggtttgtggaccaaaattatccactgaccttattaagaaccagtgtgtcaattttaattttaatggactcactggtactggtgtgttaactccttcttcaaagagatttcaaccatttcaacaatttggccgtgatgtttctgatttcactgattccgttcgagatcctaaaacatctgaaatattagacatttcaccttgctcttttgggggtgtaagtgtaattacacctggaacaaatgcttcatctgaagttgctgttctatatcaagatgttaactgcactgatgtttctacagcaattcatgcagatcaactcacaccagcttggcgcatatattctactggaaacaatgtattccagactcaagcaggctgtcttataggagctgagcatgtcgacacttcttatgagtgcgacattcctattggagctggcatttgtgctagttaccatacagtttctttattacgtagtactagccaaaaatctattgtggcttatactatgtctttaggtgctgatagttcaattgcttactctaataacaccattgctatacctactaacttttcaattagcattactacagaagtaatgcctgtttctatggctaaaacctccgtagattgtaatatgtacatctgcggagattctactgaatgtgctaatttgcttctccaatatggtagcttttgcacacaactaaatcgtgcactctcaggtattgctgctgaacaggatcgcaacacacgtgaagtgttcgctcaagtcaaacaaatgtacaaaaccccaactttgaaatattttggtggttttaatttttcacaaatattacctgaccctctaaagccaactaagaggtcttttattgaggacttgctctttaataaggtgacactcgctgatgctggcttcatgaagcaatatggcgaatgcctaggtgatattaatgctagagatctcatttgtgcgcagaagttcaatggacttacagtgttgccacctctgctcactgatgatatgattgctgcctacactgctgctctagttagtggtactgccactgctggatggacatttggtgctggcgctgctcttcaaataccttttgctatgcaaatggcatataggttcaatggcattggagttacccaaaatgttctctatgagaaccaaaaacaaatcgccaaccaatttaacaaggcgattagtcaaattcaagaatcacttacaacaacatcaactgcattgggcaagctgcaagacgttgttaaccagaatgctcaagcattaaacacacttgttaaacaacttagctctaattttggtgcaatttcaagtgtgctaaatgatatcctttcgcgacttgataaagtcgaggcggaggtacaaattgacaggttaattacaggcagacttcaaagccttcaaacctatgtaacacaacaactaatcagggctgctgaaatcagggcttctgctaatcttgctgctactaaaatgtctgagtgtgttcttggacaatcaaaaagagttgacttttgtggaaagggctaccaccttatgtccttcccacaagcagccccgcatggtgttgtcttcctacatgtcacgtatgtgccatcccaggagaggaacttcaccacagcgccagcaatttgtcatgaaggcaaagcatacttccctcgtgaaggtgtttttgtgtttaatggcacttcttggtttattacacagaggaacttcttttctccacaaataattactacagacaatacatttgtctcaggaaattgtgatgtcgttattggcatcattaacaacacagtttatgatcctctgcaacctgagcttgactcattcaaagaagagctggacaagtacttcaaaaatcatacatcaccagatgttgatcttggcgacatttcaggcattaacgcttctgtcgtcaacattcaaaaagaaattgaccgcctcaatgaggtcgctaaaaatttaaatgaatcactcattgaccttcaagaattgggaaaatatgagcaatatattaaatggccttggtatgtttggctcggcttcattgctggactaattgccatcgtcatggttacaatcttgctttgttgcatgactagttgttgcagttgcctcaagggtgcatgctcttgtggttcttgctgcaagtttgatgaggatgactctgagccagttctcaagggtgtcaaattacattacacataaacgaacttatggatttgtttatgagattttttactcttggatcaattactgcacagccagtaaaaattgacaatgcttctcctgcaagtactgttcatgctacagcaacgataccgctacaagcctcactccctttcggatggcttgttattggcgttgcatttcttgctgtttttcagagcgctaccaaaataattgcgctcaataaaagatggcagctagccctttataagggcttccagttcatttgcaatttactgctgctatttgttaccatctattcacatcttttgcttgtcgctgcaggtatggaggcgcaatttttgtacctctatgccttgatatattttctacaatgcatcaacgcatgtagaattattatgagatgttggctttgttggaagtgcaaatccaagaacccattactttatgatgccaactactttgtttgctggcacacacataactatgactactgtataccatataacagtgtcacagatacaattgtcgttactgaaggtgacggcatttcaacaccaaaactcaaagaagactaccaaattggtggttattctgaggataggcactcaggtgttaaagactatgtcgttgtacatggctatttcaccgaagtttactaccagcttgagtctacacaaattactacagacactggtattgaaaatgctacattcttcatctttaacaagcttgttaaagacccaccgaatgtgcaaatacacacaatcgacggctcttcaggagttgctaatccagcaatggatccaatttatgatgagccgacgacgactactagcgtgcctttgtaagcacaagaaagtgagtacgaacttatgtactcattcgtttcggaagaaacaggtacgttaatagttaatagcgtacttctttttcttgctttcgtggtattcttgctagtcacactagccatccttactgcgcttcgattgtgtgcgtactgctgcaatattgttaacgtgagtttagtaaaaccaacggtttacgtctactcgcgtgttaaaaatctgaactcttctgaaggagttcctgatcttctggtctaaacgaactaactattattattattctgtttggaactttaacattgcttatcatggcagacaacggtactattaccgttgaggagcttaaacaactcctggaacaatggaacctagtaataggtttcctatgcctagcctggattatgttactacaatttgcctattctaatcggaacaggtttttgtacataataaagcttgttttcctctggctcttgtggccagtaacacttgcttgttttgtgcttgctgctgtctacagaattaattgggtgactggcgggattgcgattgcaatggcttgtattgtaggcttgatgtggcttagctacttcgttgcttccttcaggctgtttgctcgtacccgctcaatgtggtcattcaacccagaaacaaacattcttctcaatgtgcctctccgggggacaattgtgaccagaccgctcatggaaagtgaacttgtcattggtgctgtgatcattcgtggtcacttgcgaatggccggacactccctagggcgctgtgacattaaggacctgccaaaagagatcactgtggctacatcacgaacgctttcttattacaaattaggagcgtcgcagcgtgtaggcactgattcaggttttgctgcatacaaccgctaccgtattggaaactataaattaaatacagaccacgccggtagcaacgacaatattgctttgctagtacagtaagtgacaacagatgtttcatcttgttgacttccaggttacaatagcagagatattgattatcattatgaggactttcaggattgctatttggaatcttgacgttataataagttcaatagtgagacaattatttaagcctctaactaagaagaattattcggagttagatgatgaagaacctatggagttagattatccataaaacgaacatgaaaattattctcttcctgacattgattgtatttacatcttgcgagctatatcactatcaggagtgtgttagaggtacgactgtactactaaaagaaccttgcccatcaggaacatacgagggcaattcaccatttcaccctcttgctgacaataaatttgcactaacttgcactagcacacactttgcttttgcttgtgctgacggtactcgacatacctatcagctgcgtgcaagatcagtttcaccaaaacttttcatcagacaagaggaggttcaacaagagctctactcgccactttttctcattgttgctgctctagtatttttaatactttgcttcaccattaagagaaagacagaatgaatgagctcactttaattgacttctatttgtgctttttagcctttctgctattccttgttttaataatgcttattatattttggttttcactcgaaatccaggatctagaagaaccttgtaccaaagtctaaacgaacatgaaacttctcattgttttgacttgtatttctctatgcagttgcatatgcactgtagtacagcgctgtgcatctaataaacctcatgtgcttgaagatccttgtaaggtacaacactaggggtaatacttatagcactgcttggctttgtgctctaggaaaggttttaccttttcatagatggcacactatggttcaaacatgcacacctaatgttactatcaactgtcaagatccagctggtggtgcgcttatagctaggtgttggtaccttcatgaaggtcaccaaactgctgcatttagagacgtacttgttgttttaaataaacgaacaaattaaaatgtctgataatggaccccaatcaaaccaacgtagtgccccccgcattacatttggtggacccacagattcaactgacaataaccagaatggaggacgcaatggggcaaggccaaaacagcgccgaccccaaggtttacccaataatactgcgtcttggttcacagctctcactcagcatggcaaggaggaacttagattccctcgaggccagggcgttccaatcaacaccaatagtggtccagatgaccaaattggctactaccgaagagctacccgacgagttcgtggtggtgacggcaaaatgaaagagctcagccccagatggtacttctattacctaggaactggcccagaagcttcacttccctacggcgctaacaaagaaggcatcgtatgggttgcaactgagggagccttgaatacacccaaagaccacattggcacccgcaatcctaataacaatgctgccaccgtgctacaacttcctcaaggaacaacattgccaaaaggcttctacgcagagggaagcagaggcggcagtcaagcctcttctcgctcctcatcacgtagtcgcggtaattcaagaaattcaactcctggcagcagtaggggaaattctcctgctcgaatggctagcggaggtggtgaaactgccctcgcgctattgctgctagacagattgaaccagcttgagagcaaagtttctggtaaaggccaacaacaacaaggccaaactgtcactaagaaatctgctgctgaggcatctaaaaagcctcgccaaaaacgtactgccacaaaacagtacaacgtcactcaagcatttgggagacgtggtccagaacaaacccaaggaaatttcggggaccaagacctaatcagacaaggaactgattacaaacattggccgcaaattgcacaatttgctccaagtgcctctgcattctttggaatgtcacgcattggcatggaagtcacaccttcgggaacatggctgacttatcatggagccattaaattggatgacaaagatccacaattcaaagacaacgtcatactgctgaacaagcacattgacgcatacaaaacattcccaccaacagagcctaaaaaggacaaaaagaaaaagactgatgaagctcagcctttgccgcagagacaaaagaagcagcccactgtgactcttcttcctgcggctgacatggatgatttctccagacaacttcaaaattccatgagtggagcttctgctgattcaactcaggcataaacactcatgatgaccacacaaggcagatgggctatgtaaacgttttcgcaattccgtttacgatacatagtctactcttgtgcagaatgaattctcgtaactaaacagcacaagtaggtttagttaactttaatctcacatagcaatctttaatcaatgtgtaacattagggaggacttgaaagagccaccacattttcatcgaggccacgcggagtacgatcgagggtacagtgaataatgctagggagagctgcctatatggaagagccctaatgtgtaaaattaattttagtagtgctatccccatgtgattttaatagcttcttaggagaatgacaaaaaaaaaaaaaaaaaaaaaaaa

SEQ ID NO: 29805 - DNA, 29736 bp, SARS Coronavirus; identical to SEQ ID NO: 29804

SEQ ID NO: 29806 - DNA, 29736 bp, SARS Coronavirus
ctacccaggaaaagccaaccaacctcgatctcttgtagatctgttctctaaacgaactttaaaatctgtgtagctgtcgctcggctgcatgcctagtgcacctacgcagtataaacaataataaattttactgtcgttgacaagaaacgagtaactcgtccctcttctgcagactgcttacggtttcgtccgtgttgcagtcgatcatcagcatacctaggtttcgtccgggtgtgaccgaaaggtaagatggagagccttgttcttggtgtcaacgagaaaacacacgtccaactcagtttgcctgtccttcaggttagagacgtgctagtgcgtggcttcggggactctgtggaagaggccctatcggaggcacgtgaacacctcaaaaatggcacttgtggtctagtagagctggaaaaaggcgtactgccccagcttgaacagccctatgtgttcattaaacgttctgatgccttaagcaccaatcacggccacaaggtcgttgagctggttgcagaaatggacggcattcagtacggtcgtagcggtataacactgggagtactcgtgccacatgtgggcgaaaccccaattgcataccgcaatgttcttcttcgtaagaacggtaataagggagccggtggtcatagctatggcatcgatctaaagtcttatgacttaggtgacgagcttggcactgatcccattgaagattatgaacaaaactggaacactaagcatggcagtggtgcactccgtgaactcactcgtgagctcaatggaggtgcagtcactcgctatgtcgacaacaatttctgtggcccagatgggtaccctcttgattgcatcaaagattttctcgcacgcgcgggcaagtcaatgtgcactctttccgaacaacttgattacatcgagtcgaagagaggtgtctactgctgccgtgaccatgagcatgaaattgcctggttcactgagcgctctgataagagctacgagcaccagacacccttcgaaattaagagtgccaagaaatttgacactttcaaaggggaatgcccaaagtttgtgtttcctcttaactcaaaagtcaaagtcattcaaccacgtgttgaaaagaaaaagactgagggtttcatggggcgtatacgctctgtgtaccctgttgcatctccacaggagtgtaacaatatgcacttgtctaccttgatgaaatgtaatcattgcgatgaagtttcatggcagacgtgcgactttctgaaagccacttgtgaacattgtggcactgaaaatttagttattgaaggacctactacatgtgggtacctacctactaatgctgtagtgaaaatgccatgtcctgcctgtcaagacccagagattggacctgagcatagtgttgcagattatcacaaccactcaaacattgaaactcgactccgcaagggaggtaggactagatgttttggaggctgtgtgtttgcctatgttggctgctataataagcgtgcctactgggttcctcgtgctagtgctgatattggctcaggccatactggcattactggtgacaatgtggagaccttgaatgaggatctccttgagatactgagtcgtgaacgtgttaacattaacattgttggcgattttcatttgaatgaagaggttgccatcattttggcatctttctctgcttctacaagtgcctttattgacactataaagagtcttgattacaagtctttcaaaaccattgttgagtcctgcggtaactataaagttaccaagggaaagcccgtaaaaggtgcttggaacattggacaacagagatcagttttaacaccactgtgtggttttccctcacaggctgctggtgttatcagatcaatttttgcgcgcacacttgatgcagcaaaccactcaattcctgatttgcaaagagcagctgtcaccatacttgatggtatttctgaacagtcattacgtcttgtcgacgccatggtttatacttcagacctgctcaccaacagtgtcattattatggcatatgtaactggtggtcttgtacaacagacttctcagtggttgtctaatcttttgggcactactgttgaaaaactcaggcctatctttgaatggattgaggcgaaacttagtgcaggagttgaatttctcaaggatgcttgggagattctcaaatttctcattacaggtgtttttgacatcgtcaagggtcaaatacaggttgcttcagataacatcaaggattgtgtaaaatgcttcattgatgttgttaacaaggcactcgaaatgtgcattgatcaagtcactatcgctggcgcaaagttgcgatcactcaacttaggtgaagtcttcatcgctcaaagcaagggactttaccgtcagtgtatacgtggcaaggagcagctgcaactactcatgcctcttaaggcaccaaaagaagtaacctttcttgaaggtgattcacatgacacagtacttacctctgaggaggttgttctcaagaacggtgaactcgaagcactcgagacgcccgttgatagcttcacaaatggagctatcgttggcacaccagtctgtgtaaatggcctcatgctcttagagattaaggacaaagaacaatactgcgcattgtctcctggtttactggctacaaacaatgtctttcgcttaaaagggggtgcaccaattaaaggtgtaacctttggagaagatactgtttgggaagttcaaggttacaagaatgtgagaatcacatttgagcttgatgaacgtgttgacaaagtgcttaatgaaaagtgctctgtctacactgttgaatccggtaccgaagttactgagtttgcatgtgttgtagcagaggctgttgtgaagactttacaaccagtttctgatctccttaccaacatgggtattgatcttgatgagtggagtgtagctacattctacttatttgatgatgctggtgaagaaaacttttcatcacgtatgtattgttccttttaccctccagatgaggaagaagaggacgatgcagagtgtgaggaagaagaaattgatgaaacctgtgaacatgagtacggtacagaggatgattatcaaggtctccctctggaatttggtgcctcagctgaaacagttcgagttgaggaagaagaagaggaagactggctggatgatactactgagcaatcagagattgagccagaaccagaacctacacctgaagaaccagttaatcagtttactggttatttaaaacttactgacaatgttgccattaaatgtgttgacatcgttaaggaggcacaaagtgctaatcctatggtgattgtaaatgctgctaacatacacctgaaacatggtggtggtgtagcaggtgcactcaacaaggcaaccaatggtgccatgcaaaaggagagtgatgattacattaagctaaatggccctcttacagtaggagggtcttgtttgctttctggacataatcttgctaagaagtgtctgcatgttgttggacctaacctaaatgcaggtgaggacatccagcttcttaaggcagcatatgaaaatttcaattcacaggacatcttacttgcaccattgttgtcagcaggcatatttggtgctaaaccacttcagtctttacaagtgtgcgtgcagacggttcgtacacaggtttatattgcagtcaatgacaaagctctttatgagcaggttgtcatggattatcttgataacctgaagcctagagtggaagcacctaaacaagaggagccaccaaacacagaagattccaaaactgaggagaaatccgtcgtacagaagcctgtcgatgtgaagccaaaaattaaggcctgcattgatgaggttaccacaacactggaagaaactaagtttcttaccaataagttactcttgtttgctgatatcaatggtaagctttaccatgattctcagaacatgcttagaggtgaagatatgtctttccttgagaaggatgcaccttacatggtaggtgatgttatcactagtggtgatatcacttgtgttgtaataccctccaaaaaggctggtggcactactgagatgctctcaagagctttgaagaaagtgccagttgatgagtatataaccacgtaccctggacaaggatgtgctggttatacacttgaggaagctaagactgctcttaagaaatgcaaatctgcattttatgtactaccttcagaagcacctaatgctaaggaagagattctaggaactgtatcctggaatttgagagaaatgcttgctcatgctgaagagacaagaaaattaatgcctatatgcatggatgttagagccataatggcaaccatccaacgtaagtataaaggaattaaaattcaagagggcatcgttgactatggtgtccgattcttcttttatactagtaaagagcctgtagcttctattattacgaagctgaactctctaaatgagccgcttgtcacaatgccaattggttatgtgacacatggttttaatcttgaagaggctgcgcgctgtatgcgttctcttaaagctcctgccgtagtgtcagtatcatcaccagatgctgttactacatataatggatacctcacttcgtcatcaaagacatctgaggagcactttgtagaaacagtttctttggctggctcttacagagattggtcctattcaggacagcgtacagagttaggtgttgaatttcttaagcgtggtgacaaaattgtgtaccacactctggagagccccgtcgagtttcatcttgacggtgaggttctttcacttgacaaactaaagagtctcttatccctgcgggaggttaagactataaaagtgttcacaactgtggacaacactaatctccacacacagcttgtggatatgtctatgacatatggacagcagtttggtccaacatacttggatggtgctgatgttacaaaaattaaacctcatgtaaatcatgagggtaagactttctttgtactacctagtgatgacacactacgtagtgaagctttcgagtactaccatactcttgatgagagttttcttggtaggtacatgtctgctttaaaccacacaaagaaatggaaatttcctcaagttggtggtttaacttcaattaaatgggctgataacaattgttatttgtctagtgttttattagcacttcaacagcttgaagtcaaattcaatgcaccagcacttcaagaggcttattatagagcccgtgctggtgatgctgctaacttttgtgcactcatactcgcttacagtaataaaactgttggcgagcttggtgatgtcagagaaactatgacccatcttctacagcatgctaatttggaatctgcaaagcgagttcttaatgtggtgtgtaaacattgtggtcagaaaactactaccttaacgggtgtagaagctgtgatgtatatgggtactctatcttatgataatcttaagacaggtgtttccattccatgtgtgtgtggtcgtgatgctacacaatatctagtacaacaagagtcttcttttgttatgatgtctgcaccacctgctgagtataaattacagcaaggtacattcttatgtgcgaatgagtacactggtaactatcagtgtggtcattacactcatataactgctaaggagaccctctatcgtattgacggagctcaccttacaaagatgtcagagtacaaaggaccagtgactgatgttttctacaaggaaacatcttacactacaaccatcaagcctgtgtcgtataaactcgatggagttacttacacagagattgaaccaaaattggatgggtattataaaaaggataatgcttactatacagagcagcctatagaccttgtaccaactcaaccattaccaaatgcgagttttgataatttcaaactcacatgttctaacacaaaatttgctgatgatttaaatcaaatgacaggcttcacaaagccagcttcacgagagctatctgtcacattcttcccagacttgaatggcgatgtagtggctattgactatagacactattcagcgagtttcaagaaaggtgctaaattactgcataagccaattgtttggcacattaaccaggctacaaccaagacaacgttcaaaccaaacacttggtgtttacgttgtctttggagtacaaagccagtagatacttcaaattcatttgaagttctggcagtagaagacacacaaggaatggacaatcttgcttgtgaaagtcaacaacccacctctgaagaagtagtggaaaatcctaccatacagaaggaagtcatagagtgtgacgtgaaaactaccgaagttgtaggcaatgtcatacttaaaccatcagatgaaggtgttaaagtaacacaagagttaggtcatgaggatcttatggctgcttatgtggaaaacacaagcattaccattaagaaacctaatgagctttcactagccttaggtttaaaaacaattgccactcatggtattgctgcaattaatagtgttccttggagtaaaattttggcttatgtcaaaccattcttaggacaagcagcaattacaacatcaaattgcgctaagagattagcacaacgtgtgtttaacaattatatgccttatgtgtttacattattgttccaattgtgtacttttactaaaagtaccaattctagaattagagcttcactacctacaactattgctaaaaatagtgttaagagtgttgctaaattatgtttggatgccggcattaattatgtgaagtcacccaaattttctaaattgttcacaatcgctatgtggctattgttgttaagtatttgcttaggttctctaatctgtgtaactgctgcttttggtgtactcttatctaattttggtgctccttcttattgtaatggcgttagagaattgtatcttaattcgtctaacgttactactatggatttctgtgaaggttcttttccttgcagcatttgtttaagtggattagactcccttgattcttatccagctcttgaaaccattcaggtgacgatttcatcgtacaagctagacttgacaattttaggtctggccgctgagtgggttttggcatatatgttgttcacaaaattcttttatttattaggtctttcagctataatgcaggtgttctttggctattttgctagtcatttcatcagcaattcttggctcatgtggtttatcattagtattgtacaaatggcacccgtttctgcaatggttaggatgtacatcttctttgcttctttctactacatatggaagagctatgttcatatcatggatggttgcacctcttcgacttgcatgatgtgctataagcgcaatcgtgccacacgcgttgagtgtacaactattgttaatggcatgaagagatctttctatgtctatgcaaatggaggccgtggcttctgcaagactcacaattggaattgtctcaattgtgacacattttgcactggtagtacattcattagtgatgaagttgctcgtgatttgtcactccagtttaaaagaccaatcaaccctactgaccagtcatcgtatattgttgatagtgttgctgtgaaaaatggcgcgcttcacctctactttgacaaggctggtcaaaagacctatgagagacatccgctctcccattttgtcaatttagacaatttgagagctaacaacactaaaggttcactgcctattaatgtcatagtttttgatggcaagtccaaatgcgacgagtctgcttctaagtctgcttctgtgtactacagtcagctgatgtgccaacctattctgttgcttgaccaagctcttgtatcagacgttggagatagtactgaagtttccgttaagatgtttgatgcttatgtcgacaccttttcagcaacttttagtgttcctatggaaaaacttaaggcacttgttgctacagctcacagcgagttagcaaagggtgtagctttagatggtgtcctttctacattcgtgtcagctgcccgacaaggtgttgttgataccgatgttgacacaaaggatgttattgaatgtctcaaactttcacatcactctgacttagaagtgacaggtgacagttgtaacaatttcatgctcacctataataaggttgaaaacatgacgcccagagatcttggcgcatgtattgactgtaatgcaaggcatatcaatgcccaagtagcaaaaagtcacaatgtttcactcatctggaatgtaaaagactacatgtctttatctgaacagctgcgtaaacaaattcgtagtgctgccaagaagaacaacataccttttagactaacttgtgctacaactagacaggttgtcaatgtcataactactaaaatctcactcaagggtggtaagattgttagtacttgttttaaacttatgcttaaggccacattattgtgcgttcttgctgcattggtttgttatatcgttatgccagtacatacattgtcaatccatgatggttacacaaatgaaatcattggttacaaagccattcaggatggtgtcactcgtgacatcatttctactgatgattgttttgcaaataaacatgctggttttgacgcatggtttagccagcgtggtggttcatacaaaaatgacaaaagctgccctgtagtagctgctatcattacaagagagattggtttcatagtgcctggcttaccgggtactgtgctgagagcaatcaatggtgacttcttgcattttctacctcgtgtttttagtgctgttggcaacatttgctacacaccttccaaactcattgagtatagtgattttgctacctctgcttgcgttcttgctgctgagtgtacaatttttaaggatgctatgggcaaacctgtgccatattgttatgacactaatttgctagagggttctatttcttatagtgagcttcgtccagacactcgttatgtgcttatggatggttccatcatacagtttcctaacacttacctggagggttctgttagagtagtaacaacttttgatgctgagtactgtagacatggtacatgcgaaaggtcagaagtaggtatttgcctatctaccagtggtagatgggttcttaataatgagcattacagagctctatcaggagttttctgtggtgttgatgcgatgaatctcatagctaacatctttactcctcttgtgcaacctgtgggtgctttagatgtgtctgcttcagtagtggctggtggtattattgccatattggtgacttgtgctgcctactactttatgaaattcagacgtgtttttggtgagtacaaccatgttgttgctgctaatgcacttttgtttttgatgtctttcactatactctgtctggtaccagcttacagctttctgccgggagtctactcagtcttttacttgtacttgacattctatttcaccaatgatgtttcattcttggctcaccttcaatggtttgccatgttttctcctattgtgcctttttggataacagcaatctatgtattctgtatttctctgaagcactgccattggttctttaacaactatcttaggaaaagagtcatgtttaatggagttacatttagtaccttcgaggaggctgctttgtgtacctttttgctcaacaaggaaatgtacctaaaattgcgtagcgagacactgttgccacttacacagtataacaggtatcttgctctatataacaagtacaagtatttcagtggagccttagatactaccagctatcgtgaagcagcttgctgccacttagcaaaggctctaaatgactttagcaactcaggtgctgatgttctctaccaaccaccacagacatcaatcacttctgctgttctgcagagtggttttaggaaaatggcattcccgtcaggcaaagttgaagggtgcatggtacaagtaacctgtggaactacaactcttaatggattgtggttggatgacacagtatactgtccaagacatgtcatttgcacagcagaagacatgcttaatcctaactatgaagatctgctcattcgcaaatccaaccatagctttcttgttcaggctggcaatgttcaacttcgtgttattggccattctatgcaaaattgtctgcttaggcttaaagttgatacttctaaccctaagacacccaagtataaatttgtccgtatccaacctggtcaaacattttcagttctagcatgctacaatggttcaccatctggtgtttatcagtgtgccatgagacctaatcataccattaaaggttctttccttaatggatcatgtggtagtgttggttttaacattgattatgattgcgtgtctttctgctatatgcatcatatggagcttccaacaggagtacacgctggtactgacttagaaggtaaattctatggtccatttgttgacagacaaactgcacaggctgcaggtacagacacaaccataacattaaatgttttggcatggctgtatgctgctgttatcaatggtgataggtggtttcttaatagattcaccactactttgaatgactttaaccttgtggcaatgaagtacaactatgaacctttgacacaagatcatgttgacatattgggacctctttctgctcaaacaggaattgccgtcttagatatgtgtgctgctttgaaagagctgctgcagaatggtatgaatggtcgtactatccttggtagcactattttagaagatgagtttacaccatttgatgttgttagacaatgctctggtgttaccttccaaggtaagttcaagaaaattgttaagggcactcatcattggatgcttttaactttcttgacatcactattgattcttgttcaaagtacacagtggtcactgtttttctttgtttacgagaatgctttcttgccatttactcttggtattatggcaattgctgcatgtgctatgctgcttgttaagcataagcacgcattcttgtgcttgtttctgttaccttctcttgcaacagttgcttactttaatatggtctacatgcctgctagctgggtgatgcgtatcatgacatggcttgaattggctgacactagcttgtctggttataggcttaaggattgtgttatgtatgcttcagctttagttttgcttattctcatgacagctcgcactgtttatgatgatgctgctagacgtgtttggacactgatgaatgtcattacacttgtttacaaagtctactatggtaatgctttagatcaagctatttccatgtgggccttagttatttctgtaacctctaactattctggtgtcgttacgactatcatgtttttagctagagctatagtgtttgtgtgtgttgagtattatccattgttatttattactggcaacaccttacagtgtatcatgcttgtttattgtttcttaggctattgttgctgctgctactttggccttttctgtttactcaaccgttacttcaggcttactcttggtgtttatgactacttggtctctacacaagaatttaggtatatgaactcccaggggcttttgcctcctaagagtagtattgatgctttcaagcttaacattaagttgttgggtattggaggtaaaccatgtatcaaggttgctactgtacagtctaaaatgtctgacgtaaagtgcacatctgtggtactgctctcggttcttcaacaacttagagtagagtcatcttctaaattgtgggcacaatgtgtacaactccacaatgatattcttcttgcaaaagacacaactgaagctttcgagaagatggtttctcttttgtctgttttgctatccatgcagggtgctgtagacattaataggttgtgcgaggaaatgctcgataaccgtgctactcttcaggctattgcttcagaatttagttctttaccatcatatgccgcttatgccactgcccaggaggcctatgagcaggctgtagctaatggtgattctgaagtcgttctcaaaaagttaaagaaatctttgaatgtggctaaatctgagtttgaccgtgatgctgccatgcaacgcaagttggaaaagatggcagatcaggctatgacccaaatgtacaaacaggcaagatctgaggacaagagggcaaaagtaactagtgctatgcaaacaatgctcttcactatgcttaggaagcttgataatgatgcacttaacaacattatcaacaatgcgcgtgatggttgtgttccactcaacatcataccattgactacagcagccaaactcatggttgttgtccctgattatggtacctacaagaacacttgtgatggtaacacctttacatatgcatctgcactctgggaaatccagcaagttgttgatgcggatagcaagattgttcaacttagtgaaattaacatggacaattcaccaaatttggcttggcctcttattgttacagctctaagagccaactcagctgttaaactacagaataatgaactgagtccagtagcactacgacagatgtcctgtgcggctggtaccacacaaacagcttgtactgatgacaatgcacttgcctactataacaattcgaagggaggtaggtttgtgctggcattactatcagaccaccaagatctcaaatgggctagattccctaagagtgatggtacaggtacaatttacacagaactggaaccaccttgtaggtttgttacagacacaccaaaagggcctaaagtgaaatacttgtacttcatcaaaggcttaaacaacctaaatagaggtatggtgctgggcagtttagctgctacagtacgtcttcaggctggaaatgctacagaagtacctgccaattcaactgtgctttccttctgtgcttttgcagtagaccctgctaaagcatataaggattacctagcaagtggaggacaaccaatcaccaactgtgtgaagatgttgtgtacacacactggtacaggacaggcaattactgtaacaccagaagctaacatggaccaagagtcctttggtggtgcttcatgttgtctgtattgtagatgccacattgaccatccaaatcctaaaggattctgtgacttgaaaggtaagtacgtccaaatacctaccacttgtgctaatgacccagtgggttttacacttagaaacacagtctgtaccgtctgcggaatgtggaaaggttatggctgtagttgtgaccaactccgcgaacccttgatgcagtctgcggatgcatcaacgtttttaaacgggtttgcggtgtaagtgcagcccgtcttacaccgtgcggcacaggcactagtactgatgtcgtctacagggcttttgatatttacaacgaaaaagttgctggttttgcaaagttcctaaaaactaattgctgtcgcttccaggagaaggatgaggaaggcaatttattagactcttactttgtagttaagaggcatactatgtctaactaccaacatgaagagactatttataacttggttaaagattgtccagcggttgctgtccatgactttttcaagtttagagtagatggtgacatggtaccacatatatcacgtcagcgtctaactaaatacacaatggctgatttagtctatgctctacgtcattttgatgagggtaattgtgatacattaaaagaaatactcgtcacatacaattgctgtgatgatgattatttcaataagaaggattggtatgacttcgtagagaatcctgacatcttacgcgtatatgctaacttaggtgagcgtgtacgccaatcattattaaagactgtacaattctgcgatgctatgcgtgatgcaggcattgtaggcgtactgacattagataatcaggatcttaatgggaactggtacgatttcggtgatttcgtacaagtagcaccaggctgcggagttcctattgtggattcatattactcattgctgatgcccatcctcactttgactagggcattggctgctgagtcccatatggatgctgatctcgcaaaaccacttattaagtgggatttgctgaaatatgattttacggaagagagactttgtctcttcgaccgttattttaaatattgggaccagacataccatcccaattgtattaactgtttggatgataggtgtatccttcattgtgcaaactttaatgtgttattttctactgtgtttccacctacaagttttggaccactagtaagaaaaatatttgtagatggtgttccttttgttgtttcaactggataccattttcgtgagttaggagtcgtacataatcaggatgtaaacttacatagctcgcgtctcagtttcaaggaacttttagtgtatgctgctgatccagctatgcatgcagcttctggcaatttattgctagataaacgcactacatgcttttcagtagctgcactaacaaacaatgttgcttttcaaactgtcaaacccggtaattttaataaagacttttatgactttgctgtgtctaaaggtttctttaaggaaggaagttctgttgaactaaaacacttcttctttgctcaggatggcaacgctgctatcagtgattatgactattatcgttataatctgccaacaatgtgtgatatcagacaactcctattcgtagttgaagttgttgataaatactttgattgttacgatggtggctgtattaatgccaaccaagtaatcgttaacaatctggataaatcagctggtttcccatttaataaatggggtaaggctagactttattatgactcaatgagttatgaggatcaagatgcacttttcgcgtatactaagcgtaatgtcatccctactataactcaaatgaatcttaagtatgccattagtgcaaagaatagagctcgcaccgtagctggtgtctctatctgtagtactatgacaaatagacagtttcatcagaaattattgaagtcaatagccgccactagaggagctactgtggtaattggaacaagcaagttttacggtggctggcataatatgttaaaaactgtttacagtgatgtagaaactccacaccttatgggttgggattatccaaaatgtgacagagccatgcctaacatgcttaggataatggcctctcttgttcttgctcgcaaacataacacttgctgtaacttatcacaccgtttctacaggttagctaacgagtgtgcgcaagtattaagtgagatggtcatgtgtggcggctcactatatgttaaaccaggtggaacatcatccggtgatgctacaactgcttatgctaatagtgtctttaacatttgtcaagctgttacagccaatgtaaatgcacttctttcaactgatggtaataagatagctgacaagtatgtccgcaatctacaacacaggctctatgagtgtctctatagaaatagggatgttgatcatgaattcgtggatgagttttacgcttacctgcgtaaacatttctccatgatgattctttctgatgatgccgttgtgtgctataacagtaactatgcggctcaaggtttagtagctagcattaagaactttaaggcagttctttattatcaaaataatgtgttcatgtctgaggcaaaatgttggactgagactgaccttactaaaggacctcacgaattttgctcacagcatacaatgctagttaaacaaggagatgattacgtgtacctgccttacccagatccatcaagaatattaggcgcaggctgttttgtcgatgatattgtcaaaacagatggtacacttatgattgaaaggttcgtgtcactggctattgatgcttacccacttacaaaacatcctaatcaggagtatgctgatgtctttcacttgtatttacaatacattagaaagttacatgatgagcttactggccacatgttggacatgtattccgtaatgctaactaatgataacacctcacggtactgggaacctgagttttatgaggctatgtacacaccacatacagtcttgcaggctgtaggtgcttgtgtattgtgcaattcacagacttcacttcgttgcggtgcctgtattaggagaccattcctatgttgcaagtgctgctatgaccatgtcatttcaacatcacacaaattagtgttgtctgttaatccctatgtttgcaatgccccaggttgtgatgtcactgatgtgacacaactgtatctaggaggtatgagctattattgcaagtcacataagcctcccattagttttccattatgtgctaatggtcaggtttttggtttatacaaaaacacatgtgtaggcagtgacaatgtcactgacttcaatgcgatagcaacatgtgattggactaatgctggcgattacatacttgccaacacttgtactgagagactcaagcttttcgcagcagaaacgctcaaagccactgaggaaacatttaagctgtcatatggtattgccactgtacgcgaagtactctctgacagagaattgcatctttcatgggaggttggaaaacctagaccaccattgaacagaaactatgtctttactggttaccgtgtaactaaaaatagtaaagtacagattggagagtacacctttgaaaaaggtgactatggtgatgctgttgtgtacagaggtactacgacatacaagttgaatgttggtgattactttgtgttgacatctcacactgtaatgccacttagtgcacctactctagtgccacaagagcactatgtgagaattactggcttgtacccaacactcaacatctcagatgagttttctagcaatgttgcaaattatcaaaaggtcggcatgcaaaagtactctacactccaaggaccacctggtactggtaagagtcattttgccatcggacttgctctctattacccatctgctcgcatagtgtatacggcatgctctcatgcagctgttgatgccctatgtgaaaaggcattaaaatatttgcccatagataaatgtagtagaatcgtacctgcgcgtgcgcgcgtagagtgttttgataaattcaaagtgaattcaacactagaacagtatgttttctgcactgtaaatgcattgccagaaacaactgctgacattgtagtctttgatgaaatctctatggctactaattatgacttgagtgttgtcaatgctagacttcgtgcaaaacactacgtctatattggcgatcctgctcaattaccagccccccgcacattgctgactaaaggcacactagaaccagaatattttaattcagtgtgcagacttatgaaaacaataggtccagacatgttccttggaacttgtcgccgttgtcctgctgaaattgttgacactgtgagtgctttagtttatgacaataagctaaaagcacacaaggataagtcagctcaatgcttcaaaatgttctacaaaggtgttattacacatgatgtttcatctgcaatcaacagacctcaaataggcgttgtaagagaatttcttacacgcaatcctgcttggagaaaagctgtttttatctcaccttataattcacagaacgctgtagcttcaaaaatcttaggattgcctacgcagactgttgattcatcacagggttctgaatatgactatgtcatattcacacaaactactgaaacagcacactcttgtaatgtcaaccgcttcaatgtggctatcacaagggcaaaaattggcattttgtgcataatgtctgatagagatctttatgacaaactgcaatttacaagtctagaaataccacgtcgcaatgtggctacattacaagcagaaaatgtaactggactttttaaggactgtagtaagatcattactggtcttcatcctacacaggcacctacacacctcagcgttgatataaagttcaagactgaaggattatgtgttgacataccaggcataccaaaggacatgacctaccgtagactcatctctatgatgggtttcaaaatgaattaccaagtcaatggttaccctaatatgtttatcacccgcgaagaagctattcgtcacgttcgtgcgtggattggctttgatgtagagggctgtcatgcaactagagatgctgtgggtactaacctacctctccagctaggattttctacaggtgttaacttagtagctgtaccgactggttatgttgacactgaaaataacacagaattcaccagagttaatgcaaaacctccaccaggtgaccagtttaaacatcttataccactcatgtataaaggcttgccctggaatgtagtgcgtattaagatagtacaaatgctcagtgatacactgaaaggattgtcagacagagtcgtgttcgtcctttgggcgcatggctttgagcttacatcaatgaagtactttgtcaagattggacctgaaagaacgtgttgtctgtgtgacaaacgtgcaacttgcttttctacttcatcagatacttatgcctgctggaatcattctgtgggttttgactatgtctataacccatttatgattgatgttcagcagtggggctttacgggtaaccttcagagtaaccatgaccaacattgccaggtacatggaaatgcacatgtggctagttgtgatgctatcatgactagatgtttagcagtccatgagtgctttgttaagcgcgttgattggtctgttgaataccctattataggagatgaactgagggttaattctgcttgcagaaaagtacaacacatggttgtgaagtctgcattgcttgctgataagtttccagttcttcatgacattggaaatccaaaggctatcaagtgtgtgcctcaggctgaagtagaatggaagttctacgatgctcagccatgtagtgacaaagcttacaaaatagaggaactcttctattcttatgctacacatcacgataaattcactgatggtgtttgtttgttttggaattgtaacgttgatcgttacccagccaatgcaattgtgtgtaggtttgacacaagagtcttgtcaaacttgaacttaccaggctgtgatggtggtagtttgtatgtgaataagcatgcattccacactccagctttcgataaaagtgcatttactaatttaaagcaattgcctttcttttactattctgatagtccttgtgagtctcatggcaaacaagtagtgtcggatattgattatgttccactcaaatctgctacgtgtattacacgatgcaatttaggtggtgctgtttgcagacaccatgcaaatgagtaccgacagtacttggatgcatataatatgatgatttctgctggatttagcctatggatttacaaacaatttgatacttataacctgtggaatacatttaccaggttacagagtttagaaaatgtggcttataatgttgttaataaaggacactttgatggacacgccggcgaagcacctgtttccatcattaataatgctgtttacacaaaggtagatggtattgatgtggagatctttgaaaataagacaacacttcctgttaatgttgcatttgagctttgggctaagcgtaacattaaaccagtgccagagattaagatactcaataatttgggtgttgatatcgctgctaatactgtaatctgggactacaaaagagaagccccagcacatgtatctacaataggtgtctgcacaatgactgacattgccaagaaacctactgagagtgcttgttcttcacttactgtcttgtttgatggtagagtggaaggacaggtagacctttttagaaacgcccgtaatggtgttttaataacagaaggttcagtcaaaggtctaacaccttcaaagggaccagcacaagctagcgtcaatggagtcacattaattggagaatcagtaaaaacacagtttaactactttaagaaagtagacggcattattcaacagttgcctgaaacctactttactcagagcagagacttagaggattttaagcccagatcacaaatggaaactgactttctcgagctcgctatggatgaattcatacagcgatataagctcgagggctatgccttcgaacacatcgtttatggagatttcagtcatggacaacttggcggtcttcatttaatgataggcttagccaagcgctcacaagattcaccacttaaattagaggattttatccctatggacagcacagtgaaaaattacttcataacagatgcgcaaacaggttcatcaaaatgtgtgtgttctgtgattgatcttttacttgatgactttgtcgagataataaagtcacaagatttgtcagtgatttcaaaagtggtcaaggttacaattgactatgctgaaatttcattcatgctttggtgtaaggatggacatgttgaaaccttctacccaaaactacaagcaagtcaagcgtggcaaccaggtgttgcgatgcctaacttgtacaagatgcaaagaatgcttcttgaaaagtgtgaccttcagaattatggtgaaaatgctgttataccaaaaggaataatgatgaatgtcgcaaagtatactcaactgtgtcaatacttaaatacacttactttagctgtaccctacaacatgagagttattcactttggtgctggctctgataaaggagttgcaccaggtacagctgtgctcagacaatggttgccaactggcacactacttgtcgattcagatcttaatgacttcgtctccgacgcagattctactttaattggagactgtgcaacagtacatacggctaataaatgggaccttattattagcgatatgtatgaccctaggaccaaacatgtgacaaaagagaatgactctaaagaagggtttttcacttatctgtgtggatttataaagcaaaaactagccctgggtggttctatagctgtaaagataacagagcattcttggaatgctgacctttacaagcttatgggccatttctcatggtggacagcttttgttacaaatgtaaatgcatcatcatcggaagcatttttaattggggctaactatcttggcaagccgaaggaacaaattgatggctataccatgcatgctaactacattttctggaggaacacaaatcctatccagttgtcttcctattcactctttgacatgagcaaatttcctcttaaattaagaggaactgctgtaatgtctcttaaggagaatcaaatcaatgatatgatttattctcttctggaaaaaggtaggcttatcattagagaaaacaacagagttgtggtttcaagtgatattcttgttaacaactaaacgaacatgtttattttcttattatttcttactctcactagtggtagtgaccttgaccggtgcaccacttttgatgatgttcaagctcctaattacactcaacatacttcatctatgaggggggtttactatcctgatgaaatttttagatcagacactctttatttaactcaggatttatttcttccattttattctaatgttacagggtttcatactattaatcatacgtttggcaaccctgtcataccttttaaggatggtatttattttgctgccacagagaaatcaaatgttgtccgtggttgggtttttggttctaccatgaacaacaagtcacagtcggtgattattattaacaattctactaatgttgttatacgagcatgtaactttgaattgtgtgacaaccctttctttgctgtttctaaacccatgggtacacagacacatactatgatattcgataatgcatttaattgcactttcgagtacatatctgatgccttttcgcttgatgtttcagaaaagtcaggtaattttaaacacttacgagagtttgtgtttaaaaataaagatgggtttctctatgtttataagggctatcaacctatagatgtagttcgtgatctaccttctggttttaacactttgaaacctatttttaagttgcctcttggtattaacattacaaattttagagccattcttacagccttttcacctgctcaagacatttggggcacgtcagctgcagcctattttgttggctatttaaagccaactacatttatgctcaagtatgatgaaaatggtacaatcacagatgctgttgattgttctcaaaatccacttgctgaactcaaatgctctgttaagagctttgagattgacaaaggaatttaccagacctctaatttcagggttgttccctcaggagatgttgtgagattccctaatattacaaacttgtgtccttttggagaggtttttaatgctactaaattcccttctgtctatgcatgggagagaaaaaaaatttctaattgtgttgctgattactctgtgctctacaactcaacatttttttcaacctttaagtgctatggcgtttctgccactaagttgaatgatctttgcttctccaatgtctatgcagattcttttgtagtcaagggagatgatgtaagacaaatagcgccaggacaaactggtgttattgctgattataattataaattgccagatgatttcatgggttgtgtccttgcttggaatactaggaacattgatgctacttcaactggtaattataattataaatataggtatcttagacatggcaagcttaggccctttgagagagacatatctaatgtgcctttctcccctgatggcaaaccttgcaccccacctgctcttaattgttattggccattaaatgattatggtttttacaccactactggcattggctaccaaccttacagagttgtagtactttcttttgaacttttaaatgcaccggccacggtttgtggaccaaaattatccactgaccttattaagaaccagtgtgtcaattttaattttaatggactcactggtactggtgtgttaactccttcttcaaagagatttcaaccatttcaacaatttggccgtgatgtttctgatttcactgattccgttcgagatcctaaaacatctgaaatattagacatttcaccttgctcttttgggggtgtaagtgtaattacacctggaacaaatgcttcatctgaagttgctgttctatatcaagatgttaactgcactgatgtttctacagcaattcatgcagatcaactcacaccagcttggcgcatatattctactggaaacaatgtattccagactcaagcaggctgtcttataggagctgagcatgtcgacacttcttatgagtgcgacattcctattggagctggcatttgtgctagttaccatacagtttctttattacgtagtactagccaaaaatctattgtggcttatactatgtctttaggtgctgatagttcaattgcttactctaataacaccattgctatacctactaacttttcaattagcattactacagaagtaatgcctgtttctatggctaaaacctccgtagattgtaatatgtacatctgcggagattctactgaatgtgctaatttgcttctccaatatggtagcttttgcacacaactaaatcgtgcactctcaggtattgctgctgaacaggatcgcaacacacgtgaagtgttcgctcaagtcaaacaaatgtacaaaaccccaactttgaaatattttggtggttttaatttttcacaaatattacctgaccctctaaagccaactaagaggtcttttattgaggacttgctctttaataaggtgacactcgctgatgctggcttcatgaagcaatatggcgaatgcctaggtgatattaatgctagagatctcatttgtgcgcagaagttcaatggacttacagtgttgccacctctgctcactgatgatatgattgctgcctacactgctgctctagttagtggtactgccactgctggatggacatttggtgctggcgctgctcttcaaataccttttgctatgcaaatggcatataggttcaatggcattggagttacccaaaatgttctctatgagaaccaaaaacaaatcgccaaccaatttaacaaggcgattagtcaaattcaagaatcacttacaacaacatcaactgcattgggcaagctgcaagacgttgttaaccagaatgctcaagcattaaacacacttgttaaacaacttagctctaattttggtgcaatttcaagtgtgctaaatgatatcctttcgcgacttgataaagtcgaggcggaggtacaaattgacaggttaattacaggcagacttcaaagccttcaaacctatgtaacacaacaactaatcagggctgctgaaatcagggcttctgctaatcttgctgctactaaaatgtctgagtgtgttcttggacaatcaaaaagagttgacttttgtggaaagggctaccaccttatgtccttcccacaagcagccccgcatggtgttgtcttcctacatgtcacgtatgtgccatcccaggagaggaacttcaccacagcgccagcaatttgtcatgaaggcaaagcatacttccctcgtgaaggtgtttttgtgtttaatggcacttcttggtttattacacagaggaacttcttttctccacaaataattactacagacaatacatttgtctcaggaaattgtgatgtcgttattggcatcattaacaacacagtttatgatcctctgcaacctgagcttgactcattcaaagaagagctggacaagtacttcaaaaatcatacatcaccagatgttgatcttggcgacatttcaggcattaacgcttctgtcgtcaacattcaaaaagaaattgaccgcctcaatgaggtcgctaaaaatttaaatgaatcactcattgaccttcaagaattgggaaaatatgagcaatatattaaatggccttggtatgtttggctcggcttcattgctggactaattgccatcgtcatggttacaatcttgctttgttgcatgactagttgttgcagttgcctcaagggtgcatgctcttgtggttcttgctgcaagtttgatgaggatgactctgagccagttctcaagggtgtcaaattacattacacataaacgaacttatggatttgtttatgagattttttactcttggatcaattactgcacagccagtaaaaattgacaatgcttctcctgcaagtactgttcatgctacagcaacgataccgctacaagcctcactccctttcggatggcttgttattggcgttgcatttcttgctgtttttcagagcgctaccaaaataattgcgctcaataaaagatggcagctagccctttataagggcttccagttcatttgcaatttactgctgctatttgttaccatctattcacatcttttgcttgtcgctgcaggtatggaggcgcaatttttgtacctctatgccttgatatattttctacaatgcatcaacgcatgtagaattattatgagatgttggctttgttggaagtgcaaatccaagaacccattactttatgatgccaactactttgtttgctggcacacacataactatgactactgtataccatataacagtgtcacagatacaattgtcgttactgaaggtgacggcatttcaacaccaaaactcaaagaagactaccaaattggtggttattctgaggataggcactcaggtgttaaagactatgtcgttgtacatggctatttcaccgaagtttactaccagcttgagtctacacaaattactacagacactggtattgaaaatgctacattcttcatctttaacaagcttgttaaagacccaccgaatgtgcaaatacacacaatcgacggctcttcaggagttgctaatccagcaatggatccaatttatgatgagccgacgacgactactagcgtgcctttgtaagcacaagaaagtgagtacgaacttatgtactcattcgtttcggaagaaacaggtacgttaatagttaatagcgtacttctttttcttgctttcgtggtattcttgctagtcacactagccatccttactgcgcttcgattgtgtgcgtactgctgcaatattgttaacgtgagtttagtaaaaccaacggtttacgtctactcgcgtgttaaaaatctgaactcttctgaaggagttcctgatcttctggtctaaacgaactaactattattattattctgtttggaactttaacattgcttatcatggcagacaacggtactattaccgttgaggagcttaaacaactcctggaacaatggaacctagtaataggtttcctatgcctagcctggattatgttactacaatttgcctattctaatcggaacaggtttttgtacataataaagcttgttttcctctggctcttgtggccagtaacacttgcttgttttgtgcttgctgctgtctacagaattaattgggtgactggcgggattgcgattgcaatggcttgtattgtaggcttgatgtggcttagctacttcgttgcttccttcaggctgtttgctcgtacccgctcaatgtggtcattcaacccagaaacaaacattcttctcaatgtgcctctccgggggacaattgtgaccagaccgctcatggaaagtgaacttgtcattggtgctgtgatcattcgtggtcacttgcgaatggccggacactccctagggcgctgtgacattaaggacctgccaaaagagatcactgtggctacatcacgaacgctttcttattacaaattaggagcgtcgcagcgtgtaggcactgattcaggttttgctgcatacaaccgctaccgtattggaaactataaattaaatacagaccacgccggtagcaacgacaatattgctttgctagtacagtaagtgacaacagatgtttcatcttgttgacttccaggttacaatagcagagatattgattatcattatgaggactttcaggattgctatttggaatcttgacgttataataagttcaatagtgagacaattatttaagcctctaactaagaagaattattcggagttagatgatgaagaacctatggagttagattatccataaaacgaacatgaaaattattctcttcctgacattgattgtatttacatcttgcgagctatatcactatcaggagtgtgttagaggtacgactgtactactaaaagaaccttgcccatcaggaacatacgagggcaattcaccatttcaccctcttgctgacaataaatttgcactaacttgcactagcacacactttgcttttgcttgtgctgacggtactcgacatacctatcagctgcgtgcaagatcagtttcaccaaaacttttcatcagacaagaggaggttcaacaagagctctactcgccactttttctcattgttgctgctctagtatttttaatactttgcttcaccattaagagaaagacagaatgaatgagctcactttaattgacttctatttgtgctttttagcctttctgctattccttgttttaataatgcttattatattttggttttcactcgaaatccaggatctagaagaaccttgtaccaaagtctaaacgaacatgaaacttctcattgttttgacttgtatttctctatgcagttgcatatgcactgtagtacagcgctgtgcatctaataaacctcatgtgcttgaagatccttgtaaggtacaacactaggggtaatacttatagcactgcttggctttgtgctctaggaaaggttttaccttttcatagatggcacactatggttcaaacatgcacacctaatgttactatcaactgtcaagatccagctggtggtgcgcttatagctaggtgttggtaccttcatgaaggtcaccaaactgctgcatttagagacgtacttgttgttttaactaaacgaacaaattaaaatgtctgataatggaccccaatcaaaccaacgtagtgccccccgcattacatttggtggacccacagattcaactgacaataaccagaatggaggacgcaatggggcaaggccaaaacagcgccgaccccaaggtttacccaataatactgcgtcttggttcacagctctcactcagcatggcaaggaggaacttagattccctcgaggccagggcgttccaatcaacaccaatagtggtccagatgaccaaattggctactaccgaagagctacccgacgagttcgtggtggtgacggcaaaatgaaagagctcagccccagatggtacttctattacctaggaactggcccagaagcttcacttccctacggcgctaacaaagaaggcatcgtatgggttgcaactgagggagccttgaatacacccaaagaccacattggcacccgcaatcctaataacaatgctgccaccgtgctacaacttcctcaaggaacaacattgccaaaaggcttctacgcagagggaagcagaggcggcagtcaagcctcttctcgctcctcatcacgtagtcgcggtaattcaagaaattcaactcctggcagcagtaggggaaattctcctgctcgaatggctagcggaggtggtgaaactgccctcgcgctattgctgctagacagattgaaccagcttgagagcaaagtttctggtaaaggccaacaacaacaaggccaaactgtcactaagaaatctgctgctgaggcatctaaaaagcctcgccaaaaacgtactgccacaaaacagtacaacgtcactcaagcatttgggagacgtggtccagaacaaacccaaggaaatttcggggaccaagacctaatcagacaaggaactgattacaaacattggccgcaaattgcacaatttgctccaagtgcctctgcattctttggaatgtcacgcattggcatggaagtcacaccttcgggaacatggctgacttatcatggagccattaaattggatgacaaagatccacaattcaaagacaacgtcatactgctgaacaagcacattgacgcatacaaaacattcccaccaacagagcctaaaaaggacaaaaagaaaaagactgatgaagctcagcctttgccgcagagacaaaagaagcagcccactgtgactcttcttcctgcggctgacatggatgatttctccagacaacttcaaaattccatgagtggagcttctgctgattcaactcaggcataaacactcatgatgaccacacaaggcagatgggctatgtaaacgttttcgcaattccgtttacgatacatagtctactcttgtgcagaatgaattctcgtaactaaacagcacaagtaggtttagttaactttaatctcacatagcaatctttaatcaatgtgtaacattagggaggacttgaaagagccaccacattttcatcgaggccacgcggagtacgatcgagggtacagtgaataatgctagggagagctgcctatatggaagagccctaatgtgtaaaattaattttagtagtgctatccccatgtgattttaatagcttcttaggagaatgacaaaaaaaaaaaaaaaaaaaaaaaa

SEQ ID NO: 29807 - DNA, 29573 bp, SARS Coronavirus
aactttaaaatctgtgtagctgtcgctcggctgcatgcctagtgcacctacgcagtataaacaataataaattttactgtcgttgacaagaaacgagtaactcgtccctcttctgcagactgcttacggtttcgtccgtgttgcagtcgatcatcagcatacctaggtttcgtccgggtgtgaccgaaaggtaagatggagagccttgttcttggtgtcaacgagaaaacacacgtccaactcagtttgcctgtccttcaggttagagacgtgctagtgcgtggcttcggggactctgtggaagaggccctatcggaggcacgtgaacacctcaaaaatggcacttgtggtctagtagagctggaaaaaggcgtactgccccagcttgaacagccctatgtgttcattaaacgttctgatgccttaagcaccaatcacggccacaaggtcgttgagctggttgcagaaatggacggcattcagtacggtcgtagcggtataacactgggagtactcgtgccacatgtgggcgaaaccccaattgcataccgcaatgttcttcttcgtaagaacggtaataagggagccggtggtcatagctatggcatcgatctaaagtcttatgacttaggtgacgagcttggcactgatcccattgaagattatgaacaaaactggaacactaagcatggcagtggtgcactccgtgaactcactcgtgagctcaatggaggtgcagtcactcgctatgtcgacaacaatttctgtggcccagatgggtaccctcttgattgcatcaaagattttctcgcacgcgcgggcaagtcaatgtgcactctttccgaacaacttgattacatcgagtcgaagagaggtgtctactgctgccgtgaccatgagcatgaaattgcctggttcactgagcgctctgataagagctacgagcaccagacacccttcgaaattaagagtgccaagaaatttgacactttcaaaggggaatgcccaaagtttgtgtttcctcttaactcaaaagtcaaagtcattcaaccacgtgttgaaaagaaaaagactgagggtttcatggggcgtatacgctctgtgtaccctgttgcatctccacaggagtgtaacaatatgcacttgtctaccttgatgaaatgtaatcattgcgatgaagtttcatggcagacgtgcgactttctgaaagccacttgtgaacattgtggcactgaaaatttagttattgaaggacctactacatgtgggtacctacctactaatgctgtagtgaaaatgccatgtcctgcctgtcaagacccagagattggacctgagcatagtgttgcagattatcacaaccactcaaacattgaaactcgactccgcaagggaggtaggactagatgttttggaggctgtgtgtttgcctatgttggctgctataataagcgtgcctactgggttcctcgtgctagtgctgatattggctcaggccatactggcattactggtgacaatgtggagaccttgaatgaggatctccttgagatactgagtcgtgaacgtgttaacattaacattgttggcgattttcatttgaatgaagaggttgccatcattttggcatctttctctgcttctacaagtgcctttattgacactataaagagtcttgattacaagtctttcaaaaccattgttgagtcctgcggtaactataaagttaccaagggaaagcccgtaaaaggtgcttggaacattggacaacagagatcagttttaacaccactgtgtggttttccctcacaggctgctggtgttatcagatcaatttttgcgcgcacacttgatgcagcaaaccactcaattcctgatttgcaaagagcagctgtcaccatacttgatggtatttctgaacagtcattacgtcttgtcgacgccatggtttatacttcagacctgctcaccaacagtgtcattattatggcatatgtaactggtggtcttgtacaacagacttctcagtggttgtctaatcttttgggcactactgttgaaaaactcaggcctatctttgaatggattgaggcgaaacttagtgcaggagttgaatttctcaaggatgcttgggagattctcaaatttctcattacaggtgtttttgacatcgtcaagggtcaaatacaggttgcttcagataacatcaaggattgtgtaaaatgcttcattgatgttgttaacaaggcactcgaaatgtgcattgatcaagtcactatcgctggcgcaaagttgcgatcactcaacttaggtgaagtcttcatcgctcaaagcaagggactttaccgtcagtgtatacgtggcaaggagcagctgcaactactcatgcctcttaaggcaccaaaagaagtaacctttcttgaaggtgattcacatgacacagtacttacctctgaggaggttgttctcaagaacggtgaactcgaagcactcgagacgcccgttgatagcttcacaaatggagctatcgttggcacaccagtctgtgtaaatggcctcatgctcttagagattaaggacaaagaacaatactgcgcattgtctcctggtttactggctacaaacaatgtctttcgcttaaaagggggtgcaccaattaaaggtgtaacctttggagaagatactgtttgggaagttcaaggttacaagaatgtgagaatcacatttgagcttgatgaacgtgttgacaaagtgcttaatgaaaagtgctctgtctacactgttgaatccggtaccgaagttactgagtttgcatgtgttgtagcagaggctgttgtgaagactttacaaccagtttctgatctccttaccaacatgggtattgatcttgatgagtggagtgtagctacattctacttatttgatgatgctggtgaagaaaacttttcatcacgtatgtattgttccttttaccctccagatgaggaagaagaggacgatgcagagtgtgaggaagaagaaattgatgaaacctgtgaacatgagtacggtacagaggatgattatcaaggtctccctctggaatttggtgcctcagctgaaacagttcgagttgaggaagaagaagaggaagactggctggatgatactactgagcaatcagagattgagccagaaccagaacctacacctgaagaaccagttaatcagtttactggttatttaaaacttactgacaatgttgccattaaatgtgttgacatcgttaaggaggcacaaagtgctaatcctatggtgattgtaaatgctgctaacatacacctgaaacatggtggtggtgtagcaggtgcactcaacaaggcaaccaatggtgccatgcaaaaggagagtgatgattacattaagctaaatggccctcttacagtaggagggtcttgtttgctttctggacataatcttgctaagaagtgtctgcatgttgttggacctaacctaaatgcaggtgaggacatccagcttcttaaggcagcatatgaaaatttcaattcacaggacatcttacttgcaccattgttgtcagcaggcatatttggtgctaaaccacttcagtctttacaagtgtgcgtgcagacggttcgtacacaggtttatattgcagtcaatgacaaagctctttatgagcaggttgtcatggattatcttgataacctgaagcctagagtggaagcacctaaacaagaggagccaccaaacacagaagattccaaaactgaggagaaatccgtcgtacagaagcctgtcgatgtgaagccaaaaattaaggcctgcattgatgaggttaccacaacactggaagaaactaagtttcttaccaataagttactcttgtttgctgatatcaatggtaagctttaccatgattctcagaacatgcttagaggtgaagatatgtctttccttgagaaggatgcaccttacatggtaggtgatgttatcactagtggtgatatcacttgtgttgtaataccctccaaaaaggctggtggcactactgagatgctctcaagagctttgaagaaagtgccagttgatgagtatataaccacgtaccctggacaaggatgtgctggttatacacttgaggaagctaagactgctcttaagaaatgcaaatctgcattttatgtactaccttcagaagcacctaatgctaaggaagagattctaggaactgtatcctggaatttgagagaaatgcttgctcatgctgaagagacaagaaaattaatgcctatatgcatggatgttagagccataatggcaaccatccaacgtaagtataaaggaattaaaattcaagagggcatcgttgactatggtgtccgattcttcttttatactagtaaagagcctgtagcttctattattacgaagctgaactctctaaatgagccgcttgtcacaatgccaattggttatgtgacacatggttttaatcttgaagaggctgcgcgctgtatgcgttctcttaaagctcctgccgtagtgtcagtatcatcaccagatgctgttactacatataatggatacctcacttcgtcatcaaagacatctgaggagcactttgtagaaacagtttctttggctggctcttacagagattggtcctattcaggacagcgtacagagttaggtgttgaatttcttaagcgtggtgacaaaattgtgtaccacactctggagagccccgtcgagtttcatcttgacggtgaggttctttcacttgacaaactaaagagtctcttatccctgcgggaggttaagactataaaagtgttcacaactgtggacaacactaatctccacacacagcttgtggatatgtctatgacatatggacagcagtttggtccaacatacttggatggtgctgatgttacaaaaattaaacctcatgtaaatcatgagggtaagactttctttgtactacctagtgatgacacactacgtagtgaagctttcgagtactaccatactcttgatgagagttttcttggtaggtacatgtctgctttaaaccacacaaagaaatggaaatttcctcaagttggtggtttaacttcaattaaatgggctgataacaattgttatttgtctagtgttttattagcacttcaacagcttgaagtcaaattcaatgcaccagcacttcaagaggcttattatagagcccgtgctggtgatgctgctaacttttgtgcactcatactcgcttacagtaataaaactgttggcgagcttggtgatgtcagagaaactatgacccatcttctacagcatgctaatttggaatctgcaaagcgagttcttaatgtggtgtgtaaacattgtggtcagaaaactactaccttaacgggtgtagaagctgtgatgtatatgggtactctatcttatgataatcttaagacaggtgtttccattccatgtgtgtgtggtcgtgatgctacacaatatctagtacaacaagagtcttcttttgttatgatgtctgcaccacctgctgagtataaattacagcaaggtacattcttatgtgcgaatgagtacactggtaactatcagtgtggtcattacactcatataactgctaaggagaccctctatcgtattgacggagctcaccttacaaagatgtcagagtacaaaggaccagtgactgatgttttctacaaggaaacatcttacactacaaccatcaagcctgtgtcgtataaactcgatggagttacttacacagagattgaaccaaaattggatgggtattataaaaaggataatgcttactatacagagcagcctatagaccttgtaccaactcaaccattaccaaatgcgagttttgataatttcaaactcacatgttctaacacaaaatttgctgatgatttaaatcaaatgacaggcttcacaaagccagcttcacgagagctatctgtcacattcttcccagacttgaatggcgatgtagtggctattgactatagacactattcagcgagtttcaagaaaggtgctaaattactgcataagccaattgtttggcacattaaccaggctacaaccaagacaacgttcaaaccaaacacttggtgtttacgttgtctttggagtacaaagccagtagatacttcaaattcatttgaagttctggcagtagaagacacacaaggaatggacaatcttgcttgtgaaagtcaacaacccacctctgaagaagtagtggaaaatcctaccatacagaaggaagtcatagagtgtgacgtgaaaactaccgaagttgtaggcaatgtcatacttaaaccatcagatgaaggtgttaaagtaacacaagagttaggtcatgaggatcttatggctgcttatgtggaaaacacaagcattaccattaagaaacctaatgagctttcactagccttaggtttaaaaacaattgccactcatggtattgctgcaattaatagtgttccttggagtaaaattttggcttatgtcaaaccattcttaggacaagcagcaattacaacatcaaattgcgctaagagattagcacaacgtgtgtttaacaattatatgccttatgtgtttacattattgttccaattgtgtacttttactaaaagtaccaattctagaattagagcttcactacctacaactattgctaaaaatagtgttaagagtgttgctaaattatgtttggatgccggcattaattatgtgaagtcacccaaattttctaaattgttcacaatcgctatgtggctattgttgttaagtatttgcttaggttctctaatctgtgtaactgctgcttttggtgtactcttatctaattttggtgctccttcttattgtaatggcgttagagaattgtatcttaattcgtctaacgttactactatggatttctgtgaaggttcttttccttgcagcatttgtttaagtggattagactcccttgattcttatccagctcttgaaaccattcaggtgacgatttcatcgtacaagctagacttgacaattttaggtctggccgctgagtgggttttggcatatatgttgttcacaaaattcttttatttattaggtctttcagctataatgcaggtgttctttggctattttgctagtcatttcatcagcaattcttggctcatgtggtttatcattagtattgtacaaatggcacccgtttctgcaatggttaggatgtacatcttctttgcttctttctactacatatggaagagctatgttcatatcatggatggttgcacctcttcgacttgcatgatgtgctataagcgcaatcgtgccacacgcgttgagtgtacaactattgttaatggcatgaagagatctttctatgtctatgcaaatggaggccgtggcttctgcaagactcacaattggaattgtctcaattgtgacacattttgcactggtagtacattcattagtgatgaagttgctcgtgatttgtcactccagtttaaaagaccaatcaaccctactgaccagtcatcgtatattgttgatagtgttgctgtgaaaaatggcgcgcttcacctctactttgacaaggctggtcaaaagacctatgagagacatccgctctcccattttgtcaatttagacaatttgagagctaacaacactaaaggttcactgcctattaatgtcatagtttttgatggcaagtccaaatgcgacgagtctgcttctaagtctgcttctgtgtactacagtcagctgatgtgccaacctattctgttgcttgaccaagctcttgtatcagacgttggagatagtactgaagtttccgttaagatgtttgatgcttatgtcgacaccttttcagcaacttttagtgttcctatggaaaaacttaaggcacttgttgctacagctcacagcgagttagcaaagggtgtagctttagatggtgtcctttctacattcgtgtcagctgcccgacaaggtgttgttgataccgatgttgacacaaaggatgttattgaatgtctcaaactttcacatcactctgacttagaagtgacaggtgacagttgtaacaatttcatgctcacctataataaggttgaaaacatgacgcccagagatcttggcgcatgtattgactgtaatgcaaggcatatcaatgcccaagtagcaaaaagtcacaatgtttcactcatctggaatgtaaaagactacatgtctttatctgaacagctgcgtaaacaaattcgtagtgctgccaagaagaacaacataccttttagactaacttgtgctacaactagacaggttgtcaatgtcataactactaaaatctcactcaagggtggtaagattgttagtacttgttttaaacttatgcttaaggccacattattgtgcgttcttgctgcattggtttgttatatcgttatgccagtacatacattgtcaatccatgatggttacacaaatgaaatcattggttacaaagccattcaggatggtgtcactcgtgacatcatttctactgatgattgttttgcaaataaacatgctggttttgacgcatggtttagccagcgtggtggttcatacaaaaatgacaaaagctgccctgtagtagctgctatcattacaagagagattggtttcatagtgcctggcttaccgggtactgtgctgagagcaatcaatggtgacttcttgcattttctacctcgtgtttttagtgctgttggcaacatttgctacacaccttccaaactcattgagtatagtgattttgctacctctgcttgcgttcttgctgctgagtgtacaatttttaaggatgctatgggcaaacctgtgccatattgttatgacactaatttgctagagggttctatttcttatagtgagcttcgtccagacactcgttatgtgcttatggatggttccatcatacagtttcctaacacttacctggagggttctgttagagtagtaacaacttttgatgctgagtactgtagacatggtacatgcgaaaggtcagaagtaggtatttgcctatctaccagtggtagatgggttcttaataatgagcattacagagctctatcaggagttttctgtggtgttgatgcgatgaatctcatagctaacatctttactcctcttgtgcaacctgtgggtgctttagatgtgtctgcttcagtagtggctggtggtattattgccatattggtgacttgtgctgcctactactttatgaaattcagacgtgtttttggtgagtacaaccatgttgttgctgctaatgcacttttgtttttgatgtctttcactatactctgtctggtaccagcttacagctttctgccgggagtctactcagtcttttacttgtacttgacattctatttcaccaatgatgtttcattcttggctcaccttcaatggtttgccatgttttctcctattgtgcctttttggataacagcaatctatgtattctgtatttctctgaagcactgccattggttctttaacaactatcttaggaaaagagtcatgtttaatggagttacatttagtaccttcgaggaggctgctttgtgtacctttttgctcaacaaggaaatgtacctaaaattgcgtagcgagacactgttgccacttacacagtataacaggtatcttgctctatataacaagtacaagtatttcagtggagccttagatactaccagctatcgtgaagcagcttgctgccacttagcaaaggctctaaatgactttagcaactcaggtgctgatgttctctaccaaccaccacagacatcaatcacttctgctgttctgcagagtggttttaggaaaatggcattcccgtcaggcaaagttgaagggtgcatggtacaagtaacctgtggaactacaactcttaatggattgtggttggatgacacagtatactgtccaagacatgtcatttgcacagcagaagacatgcttaatcctaactatgaagatctgctcattcgcaaatccaaccatagctttcttgttcaggctggcaatgttcaacttcgtgttattggccattctatgcaaaattgtctgcttaggcttaaagttgatacttctaaccctaagacacccaagtataaatttgtccgtatccaacctggtcaaacattttcagttctagcatgctacaatggttcaccatctggtgtttatcagtgtgccatgagacctaatcataccattaaaggttctttccttaatggatcatgtggtagtgttggttttaacattgattatgattgcgtgtctttctgctatatgcatcatatggagcttccaacaggagtacacgctggtactgacttagaaggtaaattctatggtccatttgttgacagacaaactgcacaggctgcaggtacagacacaaccataacattaaatgttttggcatggctgtatgctgctgttatcaatggtgataggtggtttcttaatagattcaccactactttgaatgactttaaccttgtggcaatgaagtacaactatgaacctttgacacaagatcatgttgacatattgggacctctttctgctcaaacaggaattgccgtcttagatatgtgtgctgctttgaaagagctgctgcagaatggtatgaatggtcgtactatccttggtagcactattttagaagatgagtttacaccatttgatgttgttagacaatgctctggtgttaccttccaaggtaagttcaagaaaattgttaagggcactcatcattggatgcttttaactttcttgacatcactattgattcttgttcaaagtacacagtggtcactgtttttctttgtttacgagaatgctttcttgccatttactcttggtattatggcaattgctgcatgtgctatgctgcttgttaagcataagcacgcattcttgtgcttgtttctgttaccttctcttgcaacagttgcttactttaatatggtctacatgcctgctagctgggtgatgcgtatcatgacatggcttgaattggctgacactagcttgtctggttataggcttaaggattgtgttatgtatgcttcagctttagttttgcttattctcatgacagctcgcactgtttatgatgatgctgctagacgtgtttggacactgatgaatgtcattacacttgtttacaaagtctactatggtaatgctttagatcaagctatttccatgtgggccttagttatttctgtaacctctaactattctggtgtcgttacgactatcatgtttttagctagagctatagtgtttgtgtgtgttgagtattatccattgttatttattactggcaacaccttacagtgtatcatgcttgtttattgtttcttaggctattgttgctgctgctactttggccttttctgtttactcaaccgttacttcaggcttactcttggtgtttatgactacttggtctctacacaagaatttaggtatatgaactcccaggggcttttgcctcctaagagtagtattgatgctttcaagcttaacattaagttgttgggtattggaggtaaaccatgtatcaaggttgctactgtacagtctaaaatgtctgacgtaaagtgcacatctgtggtactgctctcggttcttcaacaacttagagtagagtcatcttctaaattgtgggcacaatgtgtacaactccacaatgatattcttcttgcaaaagacacaactgaagctttcgagaagatggtttctcttttgtctgttttgctatccatgcagggtgctgtagacattaataggttgtgcgaggaaatgctcgataaccgtgctactcttcaggctattgcttcagaatttagttctttaccatcatatgccgcttatgccactgcccaggaggcctatgagcaggctgtagctaatggtgattctgaagtcgttctcaaaaagttaaagaaatctttgaatgtggctaaatctgagtttgaccgtgatgctgccatgcaacgcaagttggaaaagatggcagatcaggctatgacccaaatgtacaaacaggcaagatctgaggacaagagggcaaaagtaactagtgctatgcaaacaatgctcttcactatgcttaggaagcttgataatgatgcacttaacaacattatcaacaatgcgcgtgatggttgtgttccactcaacatcataccattgactacagcagccaaactcatggttgttgtccctgattatggtacctacaagaacacttgtgatggtaacacctttacatatgcatctgcactctgggaaatccagcaagttgttgatgcggatagcaagattgttcaacttagtgaaattaacatggacaattcaccaaatttggcttggcctcttattgttacagctctaagagccaactcagctgttaaactacagaataatgaactgagtccagtagcactacgacagatgtcctgtgcggctggtaccacacaaacagcttgtactgatgacaatgcacttgcctactataacaattcgaagggaggtaggtttgtgctggcattactatcagaccaccaagatctcaaatgggctagattccctaagagtgatggtacaggtacaatttacacagaactggaaccaccttgtaggtttgttacagacacaccaaaagggcctaaagtgaaatacttgtacttcatcaaaggcttaaacaacctaaatagaggtatggtgctgggcagtttagctgctacagtacgtcttcaggctggaaatgctacagaagtacctgccaattcaactgtgctttccttctgtgcttttgcagtagaccctgctaaagcatataaggattacctagcaagtggaggacaaccaatcaccaactgtgtgaagatgttgtgtacacacactggtacaggacaggcaattactgtaacaccagaagctaacatggaccaagagtcctttggtggtgcttcatgttgtctgtattgtagatgccacattgaccatccaaatcctaaaggattctgtgacttgaaaggtaagtacgtccaaatacctaccacttgtgctaatgacccagtgggttttacacttagaaacacagtctgtaccgtctgcggaatgtggaaaggttatggctgtagttgtgaccaactccgcgaacccttgatgcagtctgcggatgcatcaacgtttttaaacgggtttgcggtgtaagtgcagcccgtcttacaccgtgcggcacaggcactagtactgatgtcgtctacagggcttttgatatttacaacgaaaaagttgctggttttgcaaagttcctaaaaactaattgctgtcgcttccaggagaaggatgaggaaggcaatttattagactcttactttgtagttaagaggcatactatgtctaactaccaacatgaagagactatttataacttggttaaagattgtccagcggttgctgtccatgactttttcaagtttagagtagatggtgacatggtaccacatatatcacgtcagcgtctaactaaatacacaatggctgatttagtctatgctctacgtcattttgatgagggtaattgtgatacattaaaagaaatactcgtcacatacaattgctgtgatgatgattatttcaataagaaggattggtatgacttcgtagagaatcctgacatcttacgcgtatatgctaacttaggtgagcgtgtacgccaatcattattaaagactgtacaattctgcgatgctatgcgtgatgcaggcattgtaggcgtactgacattagataatcaggatcttaatgggaactggtacgatttcggtgatttcgtacaagtagcaccaggctgcggagttcctattgtggattcatattactcattgctgatgcccatcctcactttgactagggcattggctgctgagtcccatatggatgctgatctcgcaaaaccacttattaagtgggatttgctgaaatatgattttacggaagagagactttgtctcttcgaccgttattttaaatattgggaccagacataccatcccaattgtattaactgtttggatgataggtgtatccttcattgtgcaaactttaatgtgttattttctactgtgtttccacctacaagttttggaccactagtaagaaaaatatttgtagatggtgttccttttgttgtttcaactggataccattttcgtgagttaggagtcgtacataatcaggatgtaaacttacatagctcgcgtctcagtttcaaggaacttttagtgtatgctgctgatccagctatgcatgcagcttctggcaatttattgctagataaacgcactacatgcttttcagtagctgcactaacaaacaatgttgcttttcaaactgtcaaacccggtaattttaataaagacttttatgactttgctgtgtctaaaggtttctttaaggaaggaagttctgttgaactaaaacacttcttctttgctcaggatggcaacgctgctatcagtgattatgactattatcgttataatctgccaacaatgtgtgatatcagacaactcctattcgtagttgaagttgttgataaatactttgattgttacgatggtggctgtattaatgccaaccaagtaatcgttaacaatctggataaatcagctggtttcccatttaataaatggggtaaggctagactttattatgactcaatgagttatgaggatcaagatgcacttttcgcgtatactaagcgtaatgtcatccctactataactcaaatgaatcttaagtatgccattagtgcaaagaatagagctcgcaccgtagctggtgtctctatctgtagtactatgacaaatagacagtttcatcagaaattattgaagtcaatagccgccactagaggagctactgtggtaattggaacaagcaagttttacggtggctggcataatatgttaaaaactgtttacagtgatgtagaaactccacaccttatgggttgggattatccaaaatgtgacagagccatgcctaacatgcttaggataatggcctctcttgttcttgctcgcaaacataacacttgctgtaacttatcacaccgtttctacaggttagctaacgagtgtgcgcaagtattaagtgagatggtcatgtgtggcggctcactatatgttaaaccaggtggaacatcatccggtgatgctacaactgcttatgctaatagtgtctttaacatttgtcaagctgttacagccaatgtaaatgcacttctttcaactgatggtaataagatagctgacaagtatgtccgcaatctacaacacaggctctatgagtgtctctatagaaatagggatgttgatcatgaattcgtggatgagttttacgcttacctgcgtaaacatttctccatgatgattctttctgatgatgccgttgtgtgctataacagtaactatgcggctcaaggtttagtagctagcattaagaactttaaggcagttctttattatcaaaataatgtgttcatgtctgaggcaaaatgttggactgagactgaccttactaaaggacctcacgaattttgctcacagcatacaatgctagttaaacaaggagatgattacgtgtacctgccttacccagatccatcaagaatattaggcgcaggctgttttgtcgatgatattgtcaaaacagatggtacacttatgattgaaaggttcgtgtcactggctattgatgcttacccacttacaaaacatcctaatcaggagtatgctgatgtctttcacttgtatttacaatacattagaaagttacatgatgagcttactggccacatgttggacatgtattccgtaatgctaactaatgataacacctcacggtactgggaacctgagttttatgaggctatgtacacaccacatacagtcttgcaggctgtaggtgcttgtgtattgtgcaattcacagacttcacttcgttgcggtgcctgtattaggagaccattcctatgttgcaagtgctgctatgaccatgtcatttcaacatcacacaaattagtgttgtctgttaatccctatgtttgcaatgccccaggttgtgatgtcactgatgtgacacaactgtatctaggaggtatgagctattattgcaagtcacataagcctcccattagttttccattatgtgctaatggtcaggtttttggtttatacaaaaacacatgtgtaggcagtgacaatgtcactgacttcaatgcgatagcaacatgtgattggactaatgctggcgattacatacttgccaacacttgtactgagagactcaagcttttcgcagcagaaacgctcaaagccactgaggaaacatttaagctgtcatatggtattgccactgtacgcgaagtactctctgacagagaattgcatctttcatgggaggttggaaaacctagaccaccattgaacagaaactatgtctttactggttaccgtgtaactaaaaatagtaaagtacagattggagagtacacctttgaaaaaggtgactatggtgatgctgttgtgtacagaggtactacgacatacaagttgaatgttggtgattactttgtgttgacatctcacactgtaatgccacttagtgcacctactctagtgccacaagagcactatgtgagaattactggcttgtacccaacactcaacatctcagatgagttttctagcaatgttgcaaattatcaaaaggtcggcatgcaaaagtactctacactccaaggaccacctggtactggtaagagtcattttgccatcggacttgctctctattacccatctgctcgcatagtgtatacggcatgctctcatgcagctgttgatgccctatgtgaaaaggcattaaaatatttgcccatagataaatgtagtagaatcatacctgcgcgtgcgcgcgtagagtgttttgataaattcaaagtgaattcaacactagaacagtatgttttctgcactgtaaatgcattgccagaaacaactgctgacattgtagtctttgatgaaatctctatggctactaattatgacttgagtgttgtcaatgctagacttcgtgcaaaacactacgtctatattggcgatcctgctcaattaccagccccccgcacattgctgactaaaggcacactagaaccagaatattttaattcagtgtgcagacttatgaaaacaataggtccagacatgttccttggaacttgtcgccgttgtcctgctgaaattgttgacactgtgagtgctttagtttatgacaataagctaaaagcacacaaggataagtcagctcaatgcttcaaaatgttctacaaaggtgttattacacatgatgtttcatctgcaatcaacagacctcaaataggcgttgtaagagaatttcttacacgcaatcctgcttggagaaaagctgtttttatctcaccttataattcacagaacgctgtagcttcaaaaatcttaggattgcctacgcagactgttgattcatcacagggttctgaatatgactatgtcatattcacacaaactactgaaacagcacactcttgtaatgtcaaccgcttcaatgtggctatcacaagggcaaaaattggcattttgtgcataatgtctgatagagatctttatgacaaactgcaatttacaagtctagaaataccacgtcgcaatgtggctacattacaagcagaaaatgtaactggactttttaaggactgtagtaagatcattactggtcttcatcctacacaggcacctacacacctcagcgttgatataaagttcaagactgaaggattatgtgttgacataccaggcataccaaaggacatgacctaccgtagactcatctctatgatgggtttcaaaatgaattaccaagtcaatggttaccctaatatgtttatcacccgcgaagaagctattcgtcacgttcgtgcgtggattggctttgatgtagagggctgtcatgcaactagagatgctgtgggtactaacctacctctccagctaggattttctacaggtgttaacttagtagctgtaccgactggttatgttgacactgaaaataacacagaattcaccagagttaatgcaaaacctccaccaggtgaccagtttaaacatcttataccactcatgtataaaggcttgccctggaatgtagtgcgtattaagatagtacaaatgctcagtgatacactgaaaggattgtcagacagagtcgtgttcgtcctttgggcgcatggctttgagcttacatcaatgaagtactttgtcaagattggacctgaaagaacgtgttgtctgtgtgacaaacgtgcaacttgcttttctacttcatcagatacttatgcctgctggaatcattctgtgggttttgactatgtctataacccatttatgattgatgttcagcagtggggctttacgggtaaccttcagagtaaccatgaccaacattgccaggtacatggaaatgcacatgtggctagttgtgatgctatcatgactagatgtttagcagtccatgagtgctttgttaagcgcgttgattggtctgttgaataccctattataggagatgaactgagggttaattctgcttgcagaaaagtacaacacatggttgtgaagtctgcattgcttgctgataagtttccagttcttcatgacattggaaatccaaaggctatcaagtgtgtgcctcaggctgaagtagaatggaagttctacgatgctcagccatgtagtgacaaagcttacaaaatagaggagctcttctattcttatgctacacatcacgataaattcactgatggtgtttgtttgttttggaattgtaacgttgatcgttacccagccaatgcaattgtgtgtaggtttgacacaagagtcttgtcaaacttgaacttaccaggctgtgatggtggtagtttgtatgtgaataagcatgcattccacactccagctttcgataaaagtgcatttactaatttaaagcaattgcctttcttttactattctgatagtccttgtgagtctcatggcaaacaagtagtgtcggatattgattatgttccactcaaatctgctacgtgtattacacgatgcaatttaggtggtgctgtttgcagacaccatgcaaatgagtaccgacagtacttggatgcatataatatgatgatttctgctggatttagcctatggatttacaaacaatttgatacttataacctgtggaatacatttaccaggttacagagtttagaaaatgtggcttataatgttgttaataaaggacactttgatggacacgccggcgaagcacctgtttccatcattaataatgctgtttacacaaaggtagatggtattgatgtggagatctttgaaaataagacaacacttcctgttaatgttgcatttgagctttgggctaagcgtaacattaaaccagtgccagagattaagatactcaataatttgggtgttgatatcgctgctaatactgtaatctgggactacaaaagagaagccccagcacatgtatctacaataggtgtctgcacaatgactgacattgccaagaaacctactgagagtgcttgttcttcacttactgtcttgtttgatggtagagtggaaggacaggtagacctttttagaaacgcccgtaatggtgttttaataacagaaggttcagtcaaaggtctaacaccttcaaagggaccagcacaagctagcgtcaatggagtcacattaattggagaatcagtaaaaacacagtttaactactttaagaaagtagacggcattattcaacagttgcctgaaacctactttactcagagcagagacttagaggattttaagcccagatcacaaatggaaactgactttctcgagctcgctatggatgaattcatacagcgatataagctcgagggctatgccttcgaacacatcgtttatggagatttcagtcatggacaacttggcggtcttcatttaatgataggcttagccaagcgctcacaagattcaccacttaaattagaggattttatccctatggacagcacagtgaaaaattacttcataacagatgcgcaaacaggttcatcaaaatgtgtgtgttctgtgattgatcttttacttgatgactttgtcgagataataaagtcacaagatttgtcagtgatttcaaaagtggtcaaggttacaattgactatgctgaaatttcattcatgctttggtgtaaggatggacatgttgaaaccttctacccaaaactacaagcaagtcaagcgtggcaaccaggtgttgcgatgcctaacttgtacaagatgcaaagaatgcttcttgaaaagtgtgaccttcagaattatggtgaaaatgctgttataccaaaaggaataatgatgaatgtcgcaaagtatactcaactgtgtcaatacttaaatacacttactttagctgtaccctacaacatgagagttattcactttggtgctggctctgataaaggagttgcaccaggtacagctgtgctcagacaatggttgccaactggcacactacttgtcgattcagatcttaatgacttcgtctccgacgcagattctactttaattggagactgtgcaacagtacatacggctaataaatgggaccttattattagcgatatgtatgaccctaggaccaaacatgtgacaaaagagaatgactctaaagaagggtttttcacttatctgtgtggatttataaagcaaaaactagccctgggtggttctatagctgtaaagataacagagcattcttggaatgctgacctttacaagcttatgggccatttctcatggtggacagcttttgttacaaatgtaaatgcatcatcatcggaagcatttttaattggggctaactatcttggcaagccgaaggaacaaattgatggctataccatgcatgctaactacattttctggaggaacacaaatcctatccagttgtcttcctattcactctttgacatgagcaaatttcctcttaaattaagaggaactgctgtaatgtctcttaaggagaatcaaatcaatgatatgatttattctcttctggaaaaaggtaggcttatcattagagaaaacaacagagttgtggtttcaagtgatattcttgttaacaactaaacgaacatgtttattttcttattatttcttactctcactagtggtagtgaccttgaccggtgcaccacttttgatgatgttcaagctcctaattacactcaacatacttcatctatgaggggggtttactatcctgatgaaatttttagatcagacactctttatttaactcaggatttatttcttccattttattctaatgttacagggtttcatactattaatcatacgtttggcaaccctgtcataccttttaaggatggtatttattttgctgccacagagaaatcaaatgttgtccgtggttgggtttttggttctaccatgaacaacaagtcacagtcggtgattattattaacaattctactaatgttgttatacgagcatgtaactttgaattgtgtgacaaccctttctttgctgtttctaaacccatgggtacacagacacatactatgatattcgataatgcatttaattgcactttcgagtacatatctgatgccttttcgcttgatgtttcagaaaagtcaggtaattttaaacacttacgagagtttgtgtttaaaaataaagatgggtttctctatgtttataagggctatcaacctatagatgtagttcgtgatctaccttctggttttaacactttgaaacctatttttaagttgcctcttggtattaacattacaaattttagagccattcttacagccttttcacctgctcaagacatttggggcacgtcagctgcagcctattttgttggctatttaaagccaactacatttatgctcaagtatgatgaaaatggtacaatcacagatgctgttgattgttctcaaaatccacttgctgaactcaaatgctctgttaagagctttgagattgacaaaggaatttaccagacctctaatttcagggttgttccctcaggagatgttgtgagattccctaatattacaaacttgtgtccttttggagaggtttttaatgctactaaattcccttctgtctatgcatgggagagaaaaaaaatttctaattgtgttgctgattactctgtgctctacaactcaacatttttttcaacctttaagtgctatggcgtttctgccactaagttgaatgatctttgcttctccaatgtctatgcagattcttttgtagtcaagggagatgatgtaagacaaatagcgccaggacaaactggtgttattgctgattataattataaattgccagatgatttcatgggttgtgtccttgcttggaatactaggaacattgatgctacttcaactggtaattataattataaatataggtatcttagacatggcaagcttaggccctttgagagagacatatctaatgtgcctttctcccctgatggcaaaccttgcaccccacctgctcttaattgttattggccattaaatgattatggtttttacaccactactggcattggctaccaaccttacagagttgtagtactttcttttgaacttttaaatgcaccggccacggtttgtggaccaaaattatccactgaccttattaagaaccagtgtgtcaattttaattttaatggactcactggtactggtgtgttaactccttcttcaaagagatttcaaccatttcaacaatttggccgtgatgtttctgatttcactgattccgttcgagatcctaaaacatctgaaatattagacatttcaccttgctcttttgggggtgtaagtgtaattacacctggaacaaatgcttcatctgaagttgctgttctatatcaagatgttaactgcactgatgtttctacagcaattcatgcagatcaactcacaccagcttggcgcatatattctactggaaacaatgtattccagactcaagcaggctgtcttataggagctgagcatgtcgacacttcttatgagtgcgacattcctattggagctggcatttgtgctagttaccatacagtttctttattacgtagtactagccaaaaatctattgtggcttatactatgtctttaggtgctgatagttcaattgcttactctaataacaccattgctatacctactaacttttcaattagcattactacagaagtaatgcctgtttctatggctaaaacctccgtagattgtaatatgtacatctgcggagattctactgaatgtgctaatttgcttctccaatatggtagcttttgcacacaactaaatcgtgcactctcaggtattgctgctgaacaggatcgcaacacacgtgaagtgttcgctcaagtcaaacaaatgtacaaaaccccaactttgaaatattttggtggttttaatttttcacaaatattacctgaccctctaaagccaactaagaggtcttttattgaggacttgctctttaataaggtgacactcgctgatgctggcttcatgaagcaatatggcgaatgcctaggtgatattaatgctagagatctcatttgtgcgcagaagttcaatggacttacagtgttgccacctctgctcactgatgatatgattgctgcctacactgctgctctagttagtggtactgccactgctggatggacatttggtgctggcgctgctcttcaaataccttttgctatgcaaatggcatataggttcaatggcattggagttacccaaaatgttctctatgagaaccaaaaacaaatcgccaaccaatttaacaaggcgattagtcaaattcaagaatcacttacaacaacatcaactgcattgggcaagctgcaagacgttgttaaccagaatgctcaagcattaaacacacttgttaaacaacttagctctaattttggtgcaatttcaagtgtgctaaatgatatcctttcgcgacttgataaagtcgaggcggaggtacaaattgacaggttaattacaggcagacttcaaagccttcaaacctatgtaacacaacaactaatcagggctgctgaaatcagggcttctgctaatcttgctgctactaaaatgtctgagtgtgttcttggacaatcaaaaagagttgacttttgtggaaagggctaccaccttatgtccttcccacaagcagccccgcatggtgttgtcttcctacatgtcacgtatgtgccatcccaggagaggaacttcaccacagcgccagcaatttgtcatgaaggcaaagcatacttccctcgtgaaggtgtttttgtgtttaatggcacttcttggtttattacacagaggaacttcttttctccacaaataattactacagacaatacatttgtctcaggaaattgtgatgtcgttattggcatcattaacaacacagtttatgatcctctgcaacctgagcttgactcattcaaagaagagctggacaagtacttcaaaaatcatacatcaccagatgttgatcttggcgacatttcaggcattaacgcttctgtcgtcaacattcaaaaagaaattgaccgcctcaatgaggtcgctaaaaatttaaatgaatcactcattgaccttcaagaattgggaaaatatgagcaatatattaaatggccttggtatgtttggctcggcttcattgctggactaattgccatcgtcatggttacaatcttgctttgttgcatgactagttgttgcagttgcctcaagggtgcatgctcttgtggttcttgctgcaagtttgatgaggatgactctgagccagttctcaagggtgtcaaattacattacacataaacgaacttatggatttgtttatgagattttttactcttggatcaattactgcacagccagtaaaaattgacaatgcttctcctgcaagtactgttcatgctacagcaacgataccgctacaagcctcactccctttcggatggcttgttattggcgttgcatttcttgctgtttttcagagcgctaccaaaataattgcgctcaataaaagatggcagctagccctttataagggcttccagttcatttgcaatttactgctgctatttgttaccatctattcacatcttttgcttgtcgctgcaggtatggaggcgcaatttttgtacctctatgccttgatatattttctacaatgcatcaacgcatgtagaattattatgagatgttggctttgttggaagtgcaaatccaagaacccattactttatgatgccaactactttgtttgctggcacacacataactatgactactgtataccatataacagtgtcacagatacaattgtcgttactgaaggtgacggcatttcaacaccaaaactcaaagaagactaccaaattggtggttattctgaggataggcactcaggtgttaaagactatgtcgttgtacatggctatttcaccgaagtttactaccagcttgagtctacacaaattactacagacactggtattgaaaatgctacattcttcatctttaacaagcttgttaaagacccaccgaatgtgcaaatacacacaatcgacggctcttcaggagttgctaatccagcaatggatccaatttatgatgagccgacgacgactactagcgtgcctttgtaagcacaagaaagtgagtacgaacttatgtactcattcgtttcggaagaaacaggtacgttaatagttaatagcgtacttctttttcttgctttcgtggtattcttgctagttacactagccatccttactgcgcttcgattgtgtgcgtactgctgcaatattgttaacgtgagtttagtaaaaccaacggtttacgtctactcgcgtgttaaaaatctgaactcttctgaaggagttcctgatcttctggtctaaacgaactaactattattattattctgtttggaactttaacattgcttatcatggcagacaacggtactattaccgttgaggagcttaaacaactcctggaacaatggaacctagtaataggtttcctatgcctagcctggattatgttactacaatttgcctattctaatcggaacaggtttttgtacataataaagcttgttttcctctggctcttgtggccagtaacacttgcttgttttgtgcttgctgctgtctacagaattacttgggtgactggcgggattgcgattgcaatggcttgtattgtaggcttgatgtggcttagctacttcgttgcttccttcaggctgtttgctcgtacccgctcaatgtggtcattcaacccagaaacaaacattcttctcaatgtgcctctccgggggacaattgtgaccagaccgctcatggaaagtgaacttgtcattggtgctgtgatcattcgtggtcacttgcgaatggccggacactccctagggcgctgtgacattaaggacctgccaaaagagatcactgtggctacatcacgaacgctttcttattacaaattaggagcgtcgcagcgtgtaggcactgattcaggttttgctgcatacaaccgctaccgtattggaaactataaattaaatacagaccacgccggtagcaacgacaatattgctttgctagtacagtaagtgacaacagatgtttcatcttgttgacttccaggttacaatagcagagatattgattatcattatgaggactttcaggattgctatttggaatcttgacgttataataagttcaatagtgagacaattatttaagcctctaactaagaagaattattcggagttagatgatgaagaacctatggagttagattatccataaaacgaacatgaaaattattctcttcctgacattgattgtatttacatcttgcgagctatatcactatcaggagtgtgttagaggtacgactgtactactaaaagaaccttgcccatcaggaacatacgagggcaattcaccatttcaccctcttgctgacaataaatttgcactaacttgcactagcacacactttgcttttgcttgtgctgacggtactcgacatacctatcagctgcgtgcaagatcagtttcaccaaaacttttcatcagacaagaggaggttcaacaagagctctactcgccactttttctcattgttgctgctctagtatttttaatactttgcttcaccattaagagaaagacagaatgaatgagctcactttaattgacttctatttgtgctttttagcctttctgctattccttgttttaataatgcttattatattttggttttcactcgaaatccaggatctagaagaaccttgtaccaaagtctaaacgaacatgaaacttctcattgttttgacttgtatttctttatgcagttgcatatgcactgtagtacagcgctgtgcatctaataaacctcatgtgcttgaagatccttgtaaggtacaacactaggggtaatacttatagcactgcttggctttgtgctctaggaaaggttttaccttttcatagatggcacactatggttcaaacatgcacacctaatgttactatcaactgtcaagatccagctggtggtgcgcttatagctaggtgttggtaccttcatgaaggtcaccaaactgctgcatttagagacgtacttgttgttttaaataaacgaacaaattaaaatgtctgataatggaccccaatcaaaccaacgtagtgccccccgcattacatttggtggacccacagattcaactgacaataaccagaatggaggacgcaatggggcaaggccaaaacagcgccgaccccaaggtttacccaataatactgcgtcttggttcacagctctcactcagcatggcaaggaggaacttagattccctcgaggccagggcgttccaatcaacaccaatagtggtccagatgaccaaattggctactaccgaagagctacccgacgagttcgtggtggtgacggcaaaatgaaagagctcagccccagatggtacttctattacctaggaactggcccagaagcttcacttccctacggcgctaacaaagaaggcatcgtatgggttgcaactgagggagccttgaatacacccaaagaccacattggcacccgcaatcctaataacaatgctgccaccgtgctacaacttcctcaaggaacaacattgccaaaaggcttctacgcagagggaagcagaggcggcagtcaagcctcttctcgctcctcatcacgtagtcgcggtaattcaagaaattcaactcctggcagcagtaggggaaattctcctgctcgaatggctagcggaggtggtgaaactgccctcgcgctattgctgctagacagattgaaccagcttgagagcaaagtttctggtaaaggccaacaacaacaaggccaaactgtcactaagaaatctgctgctgaggcatctaaaaagcctcgccaaaaacgtactgccacaaaacagtacaacgtcactcaagcatttgggagacgtggtccagaacaaacccaaggaaatttcggggaccaagacctaatcagacaaggaactgattacaaacattggccgcaaattgcacaatttgctccaagtgcctctgcattctttggaatgtcacgcattggcatggaagtcacaccttcgggaacatggctgacttatcatggagccattaaattggatgacaaagatccacaattcaaagacaacgtcatactgctgaacaagcacattgacgcatacaaaacattcccaccaacagagcctaaaaaggacaaaaagaaaaagactgatgaagctcagcctttgccgcagagacaaaagaagcagcccactgtgactcttcttcctgcggctgacatggatgatttctccagacaacttcaaaattccatgagtggagcttctgctgattcaactcaggcataaacactcatgatgaccacacaaggcagatgggctatgtaaacgttttcgcaattccgtttacgatacatagtctactcttgtgcagaatgaattctcgtaactaaacagcacaagtaggtttagttaactttaatctcacatagcaatctttaatcaatgtgtaacattagggaggacttgaaagagccaccacattttcatcgaggccacgcggagtacgatcgagggtacagtgaataatgctagggagagct

SEQ ID NO: 29808 - DNA, 29738 bp, SARS Coronavirus
acctacccaggaaaagccaaccaacctcgatctcttgtagatctgttctctaaacgaactttaaaatctgtgtagctgtcgctcggctgcatgcctagtgcacctacgcagtataaacaataataaattttactgtcgttgacaagaaacgagtaactcgtccctcttctgcagactgcttacggtttcgtccgtgttgcagtcgatcatcagcatacctaggtttcgtccgggtgtgaccgaaaggtaagatggagagccttgttcttggtgtcaacgagaaaacacacgtccaactcagtttgcctgtccttcaggttagagacgtgctagtgcgtggcttcggggactctgtggaagaggccctatcggaggcacgtgaacacctcaaaaatggcacttgtggtctagtagagctggaaaaaggcgtactgccccagcttgaacagccctatgtgttcattaaacgttctgatgccttaagcaccaatcacggccacaaggtcgttgagctggttgcagaaatggacggcattcagtacggtcgtagcggtataacactgggagtactcgtgccacatgtgggcgaaaccccaattgcataccgcaatgttcttcttcgtaagaacggtaataagggagccggtggtcatagctatggcatcgatctaaagtcttatgacttaggtgacgagcttggcactgatcccattgaagattatgaacaaaactggaacactaagcatggcagtggtgcactccgtgaactcactcgtgagctcaatggaggtgcagtcactcgctatgtcgacaacaatttctgtggcccagatgggtaccctcttgattgcatcaaagattttctcgcacgcgcgggcaagtcaatgtgcactctttccgaacaacttgattacatcgagtcgaagagaggtgtctactgctgccgtgaccatgagcatgaaattgcctggttcactgagcgctctgataagagctacgagcaccagacacccttcgaaattaagagtgccaagaaatttgacactttcaaaggggaatgcccaaagtttgtgtttcctcttaactcaaaagtcaaagtcattcaaccacgtgttgaaaagaaaaagactgagggtttcatggggcgtatacgctctgtgtaccctgttgcatctccacaggagtgtaacaatatgcacttgtctaccttgatgaaatgtaatcattgcgatgaagtttcatggcagacgtgcgactttctgaaagccacttgtgaacattgtggcactgaaaatttagttattgaaggacctactacatgtgggtacctacctactaatgctgtagtgaaaatgccatgtcctgcctgtcaagacccagagattggacctgagcatagtgttgcagattatcacaaccactcaaacattgaaactcgactccgcaagggaggtaggactagatgttttggaggctgtgtgtttgcctatgttggctgctataataagcgtgcctactgggttcctcgtgctagtgctgatattggctcaggccatactggcattactggtgacaatgtggagaccttgaatgaggatctccttgagatactgagtcgtgaacgtgttaacattaacattgttggcgattttcatttgaatgaagaggttgccatcattttggcatctttctctgcttctacaagtgcctttattgacactataaagagtcttgattacaagtctttcaaaaccattgttgagtcctgcggtaactataaagttaccaagggaaagcccgtaaaaggtgcttggaacattggacaacagagatcagttttaacaccactgtgtggttttccctcacaggctgctggtgttatcagatcaatttttgcgcgcacacttgatgcagcaaaccactcaattcctgatttgcaaagagcagctgtcaccatacttgatggtatttctgaacagtcattacgtcttgtcgacgccatggtttatacttcagacctgctcaccaacagtgtcattattatggcatatgtaactggtggtcttgtacaacagacttctcagtggttgtctaatcttttgggcactactgttgaaaaactcaggcctatctttgaatggattgaggcgaaacttagtgcaggagttgaatttctcaaggatgcttgggagattctcaaatttctcattacaggtgtttttgacatcgtcaagggtcaaatacaggttgcttcagataacatcaaggattgtgtaaaatgcttcattgatgttgttaacaaggcactcgaaatgtgcattgatcaagtcactatcgctggcgcaaagttgcgatcactcaacttaggtgaagtcttcatcgctcaaagcaagggactttaccgtcagtgtatacgtggcaaggagcagctgcaactactcatgcctcttaaggcaccaaaagaagtaacctttcttgaaggtgattcacatgacacagtacttacctctgaggaggttgttctcaagaacggtgaactcgaagcactcgagacgcccgttgatagcttcacaaatggagctatcgttggcacaccagtctgtgtaaatggcctcatgctcttagagattaaggacaaagaacaatactgcgcattgtctcctggtttactggctacaaacaatgtctttcgcttaaaagggggtgcaccaattaaaggtgtaacctttggagaagatactgtttgggaagttcaaggttacaagaatgtgagaatcacatttgagcttgatgaacgtgttgacaaagtgcttaatgaaaagtgctctgtctacactgttgaatccggtaccgaagttactgagtttgcatgtgttgtagcagaggctgttgtgaagactttacaaccagtttctgatctccttaccaacatgggtattgatcttgatgagtggagtgtagctacattctacttatttgatgatgctggtgaagaaaacttttcatcacgtatgtattgttccttttaccctccagatgaggaagaagaggacgatgcagagtgtgaggaagaagaaattgatgaaacctgtgaacatgagtacggtacagaggatgattatcaaggtctccctctggaatttggtgcctcagctgaaacagttcgagttgaggaagaagaagaggaagactggctggatgatactactgagcaatcagagattgagccagaaccagaacctacacctgaagaaccagttaatcagtttactggttatttaaaacttactgacaatgttgccattaaatgtgttgacatcgttaaggaggcacaaagtgctaatcctatggtgattgtaaatgctgctaacatacacctgaaacatggtggtggtgtagcaggtgcactcaacaaggcaaccaatggtgccatgcaaaaggagagtgatgattacattaagctaaatggccctcttacagtaggagggtcttgtttgctttctggacataatcttgctaagaagtgtctgcatgttgttggacctaacctaaatgcaggtgaggacatccagcttcttaaggcagcatatgaaaatttcaattcacaggacatcttacttgcaccattgttgtcagcaggcatatttggtgctaaaccacttcagtctttacaagtgtgcgtgcagacggttcgtacacaggtttatattgcagtcaatgacaaagctctttatgagcaggttgtcatggattatcttgataacctgaagcctagagtggaagcacctaaacaagaggagccaccaaacacagaagattccaaaactgaggagaaatctgtcgtacagaagcctgtcgatgtgaagccaaaaattaaggcctgcattgatgaggttaccacaacactggaagaaactaagtttcttaccaataagttactcttgtttgctgatatcaatggtaagctttaccatgattctcagaacatgcttagaggtgaagatatgtctttccttgagaaggatgcaccttacatggtaggtgatgttatcactagtggtgatatcacttgtgttgtaataccctccaaaaaggctggtggcactactgagatgctctcaagagctttgaagaaagtgccagttgatgagtatataaccacgtaccctggacaaggatgtgctggttatacacttgaggaagctaagactgctcttaagaaatgcaaatctgcattttatgtactaccttcagaagcacctaatgctaaggaagagattctaggaactgtatcctggaatttgagagaaatgcttgctcatgctgaagagacaagaaaattaatgcctatatgcatggatgttagagccataatggcaaccatccaacgtaagtataaaggaattaaaattcaagagggcatcgttgactatggtgtccgattcttcttttatactagtaaagagcctgtagcttctattattacgaagctgaactctctaaatgagccgcttgtcacaatgccaattggttatgtgacacatggttttaatcttgaagaggctgcgcgctgtatgcgttctcttaaagctcctgccgtagtgtcagtatcatcaccagatgctgttactacatataatggatacctcacttcgtcatcaaagacatctgaggagcactttgtagaaacagtttctttggctggctcttacagagattggtcctattcaggacagcgtacagagttaggtgttgaatttcttaagcgtggtgacaaaattgtgtaccacactctggagagccccgtcgagtttcatcttgacggtgaggttctttcacttgacaaactaaagagtctcttatccctgcgggaggttaagactataaaagtgttcacaactgtggacaacactaatctccacacacagcttgtggatatgtctatgacatatggacagcagtttggtccaacatacttggatggtgctgatgttacaaaaattaaacctcatgtaaatcatgagggtaagactttctttgtactacctagtgatgacacactacgtagtgaagctttcgagtactaccatactcttgatgagagttttcttggtaggtacatgtctgctttaaaccacacaaagaaatggaaatttcctcaagttggtggtttaacttcaattaaatgggctgataacaattgttatttgtctagtgttttattagcacttcaacagcttgaagtcaaattcaatgcaccagcacttcaagaggcttattatagagcccgtgctggtgatgctgctaacttttgtgcactcatactcgcttacagtaataaaactgttggcgagcttggtgatgtcagagaaactatgacccatcttctacagcatgctaatttggaatctgcaaagcgagttcttaatgtggtgtgtaaacattgtggtcagaaaactactaccttaacgggtgtagaagctgtgatgtatatgggtactctatcttatgataatcttaagacaggtgtttccattccatgtgtgtgtggtcgtgatgctacacaatatctagtacaacaagagtcttcttttgttatgatgtctgcaccacctgctgagtataaattacagcaaggtacattcttatgtgcgaatgagtacactggtaactatcagtgtggtcattacactcatataactgctaaggagaccctctatcgtattgacggagctcaccttacaaagatgtcagagtacaaaggaccagtgactgatgttttctacaaggaaacatcttacactacaaccatcaagcctgtgtcgtataaactcgatggagttacttacacagagattgaaccaaaattggatgggtattataaaaaggataatgcttactatacagagcagcctatagaccttgtaccaactcaaccattaccaaatgcgagttttgataatttcaaactcacatgttctaacacaaaatttgctgatgatttaaatcaaatgacaggcttcacaaagccagcttcacgagagctatctgtcacattcttcccagacttgaatggcgatgtagtggctattgactatagacactattcagcgagtttcaagaaaggtgctaaattactgcataagccaattgtttggcacattaaccaggctacaaccaagacaacgttcaaaccaaacacttggtgtttacgttgtctttggagtacaaagccagtagatacttcaaattcatttgaagttctggcagtagaagacacacaaggaatggacaatcttgcttgtgaaagtcaacaacccacctctgaagaagtagtggaaaatcctaccatacagaaggaagtcatagagtgtgacgtgaaaactaccgaagttgtaggcaatgtcatacttaaaccatcagatgaaggtgttaaagtaacacaagagttaggtcatgaggatcttatggctgcttatgtggaaaacacaagcattaccattaagaaacctaatgagctttcactagccttaggtttaaaaacaattgccactcatggtattgctgcaattaatagtgttccttggagtaaaattttggcttatgtcaaaccattcttaggacaagcagcaattacaacatcaaattgcgctaagagattagcacaacgtgtgtttaacaattatatgccttatgtgtttacattattgttccaattgtgtacttttactaaaagtaccaattctagaattagagcttcactacctacaactattgctaaaaatagtgttaagagtgttgctaaattatgtttggatgccggcattaattatgtgaagtcacccaaattttctaaattgttcacaatcgctatgtggctattgttgttaagtatttgcttaggttctctaatctgtgtaactgctgcttttggtgtactcttatctaattttggtgctccttcttattgtaatggcgttagagaattgtatcttaattcgtctaacgttactactatggatttctgtgaaggttcttttccttgcagcatttgtttaagtggattagactcccttgattcttatccagctcttgaaaccattcaggtgacgatttcatcgtacaagctagacttgacaattttaggtctggccgctgagtgggttttggcatatatgttgttcacaaaattcttttatttattaggtctttcagctataatgcaggtgttctttggctattttgctagtcatttcatcagcaattcttggctcatgtggtttatcattagtattgtacaaatggcacccgtttctgcaatggttaggatgtacatcttctttgcttctttctactacatatggaagagctatgttcatatcatggatggttgcacctcttcgacttgcatgatgtgctataagcgcaatcgtgccacacgcgttgagtgtacaactattgttaatggcatgaagagatctttctatgtctatgcaaatggaggccgtggcttctgcaagactcacaattggaattgtctcaattgtgacacattttgcactggtagtacattcattagtgatgaagttgctcgtgatttgtcactccagtttaaaagaccaatcaaccctactgaccagtcatcgtatattgttgatagtgttgctgtgaaaaatggcgcgcttcacctctactttgacaaggctggtcaaaagacctatgagagacatccgctctcccattttgtcaatttagacaatttgagagctaacaacactaaaggttcactgcctattaatgtcatagtttttgatggcaagtccaaatgcgacgagtctgcttctaagtctgcttctgtgtactacagtcagctgatgtgccaacctattctgttgcttgaccaagctcttgtatcagacgttggagatagtactgaagtttccgttaagatgtttgatgcttatgtcgacaccttttcagcaacttttagtgttcctatggaaaaacttaaggcacttgttgctacagctcacagcgagttagcaaagggtgtagctttagatggtgtcctttctacattcgtgtcagctgcccgacaaggtgttgttgataccgatgttgacacaaaggatgttattgaatgtctcaaactttcacatcactctgacttagaagtgacaggtgacagttgtaacaatttcatgctcacctataataaggttgaaaacatgacgcccagagatcttggcgcatgtattgactgtaatgcaaggcatatcaatgcccaagtagcaaaaagtcacaatgtttcactcatctggaatgtaaaagactacatgtctttatctgaacagctgcgtaaacaaattcgtagtgctgccaagaagaacaacataccttttagactaacttgtgctacaactagacaggttgtcaatgtcataactactaaaatctcactcaagggtggtaagattgttagtacttgttttaaacttatgcttaaggccacattattgtgcgttcttgctgcattggtttgttatatcgttatgccagtacatacattgtcaatccatgatggttacacaaatgaaatcattggttacaaagccattcaggatggtgtcactcgtgacatcatttctactgatgattgttttgcaaataaacatgctggttttgacgcatggtttagccagcgtggtggttcatacaaaaatgacaaaagctgccctgtagtagctgctatcattacaagagagattggtttcatagtgcctggcttaccgggtactgtgctgagagcaatcaatggtgacttcttgcattttctacctcgtgtttttagtgctgttggcaacatttgctacacaccttccaaactcattgagtatagtgattttgctacctctgcttgcgttcttgctgctgagtgtacaatttttaaggatgctatgggcaaacctgtgccatattgttatgacactaatttgctagagggttctatttcttatagtgagcttcgtccagacactcgttatgtgcttatggatggttccatcatacagtttcctaacacttacctggagggttctgttagagtagtaacaacttttgatgctgagtactgtagacatggtacatgcgaaaggtcagaagtaggtatttgcctatctaccagtggtagatgggttcttaataatgagcattacagagctctatcaggagttttctgtggtgttgatgcgatgaatctcatagctaacatctttactcctcttgtgcaacctgtgggtgctttagatgtgtctgcttcagtagtggctggtggtattattgccatattggtgacttgtgctgcctactactttatgaaattcagacgtgtttttggtgagtacaaccatgttgttgctgctaatgcacttttgtttttgatgtctttcactatactctgtctggtaccagcttacagctttctgccgggagtctactcagtcttttacttgtacttgacattctatttcaccaatgatgtttcattcttggctcaccttcaatggtttgccatgttttctcctattgtgcctttttggataacagcaatctatgtattctgtatttctctgaagcactgccattggttctttaacaactatcttaggaaaagagtcatgtttaatggagttacatttagtaccttcgaggaggctgctttgtgtacctttttgctcaacaaggaaatgtacctaaaattgcgtagcgagacactgttgccacttacacagtataacaggtatcttgctctatataacaagtacaagtatttcagtggagccttagatactaccagctatcgtgaagcagcttgctgccacttagcaaaggctctaaatgactttagcaactcaggtgctgatgttctctaccaaccaccacagacatcaatcacttctgctgttctgcagagtggttttaggaaaatggcattcccgtcaggcaaagttgaagggtgcatggtacaagtaacctgtggaactacaactcttaatggattgtggttggatgacacagtatactgtccaagacatgtcatttgcacagcagaagacatgcttaatcctaactatgaagatctgctcattcgcaaatccaaccatagctttcttgttcaggctggcaatgttcaacttcgtgttattggccattctatgcaaaattgtctgcttaggcttaaagttgatacttctaaccctaagacacccaagtataaatttgtccgtatccaacctggtcaaacattttcagttctagcatgctacaatggttcaccatctggtgtttatcagtgtgccatgagacctaatcataccattaaaggttctttccttaatggatcatgtggtagtgttggttttaacattgattatgattgcgtgtctttctgctatatgcatcatatggagcttccaacaggagtacacgctggtactgacttagaaggtaaattctatggtccatttgttgacagacaaactgcacaggctgcaggtacagacacaaccataacattaaatgttttggcatggctgtatgctgctgttatcaatggtgataggtggtttcttaatagattcaccactactttgaatgactttaaccttgtggcaatgaagtacaactatgaacctttgacacaagatcatgttgacatattgggacctctttctgctcaaacaggaattgccgtcttagatatgtgtgctgctttgaaagagctgctgcagaatggtatgaatggtcgtactatccttggtagcactattttagaagatgagtttacaccatttgatgttgttagacaatgctctggtgttaccttccaaggtaagttcaagaaaattgttaagggcactcatcattggatgcttttaactttcttgacatcactattgattcttgttcaaagtacacagtggtcactgtttttctttgtttacgagaatgctttcttgccatttactcttggtattatggcaattgctgcatgtgctatgctgcttgttaagcataagcacgcattcttgtgcttgtttctgttaccttctcttgcaacagttgcttactttaatatggtctacatgcctgctagctgggtgatgcgtatcatgacatggcttgaattggctgacactagcttgtctggttataggcttaaggattgtgttatgtatgcttcagctttagttttgcttattctcatgacagctcgcactgtttatgatgatgctgctagacgtgtttggacactgatgaatgtcattacacttgtttacaaagtctactatggtaatgctttagatcaagctatttccatgtgggccttagttatttctgtaacctctaactattctggtgtcgttacgactatcatgtttttagctagagctatagtgtttgtgtgtgttgagtattacccattgttatttattactggcaacaccttacagtgtatcatgcttgtttattgtttcttaggctattgttgctgctgctactttggccttttctgtttactcaaccgttacttcaggcttactcttggtgtttatgactacttggtctctacacaagaatttaggtatatgaactcccaggggcttttgcctcctaagagtagtattgatgctttcaagcttaacattaagttgttgggtattggaggtaaaccatgtatcaaggttgctactgtacagtctaaaatgtctgacgtaaagtgcacatctgtggtactgctctcggttcttcaacaacttagagtagagtcatcttctaaattgtgggcacaatgtgtacaactccacaatgatattcttcttgcaaaagacacaactgaagctttcgagaagatggtttctcttttgtctgttttgctatccatgcagggtgctgtagacattaataggttgtgcgaggaaatgctcgataaccgtgctactcttcaggctattgcttcagaatttagttctttaccatcatatgccgcttatgccactgcccaggaggcctatgagcaggctgtagctaatggtgattctgaagtcgttctcaaaaagttaaagaaatctttgaatgtggctaaatctgagtttgaccgtgatgctgccatgcaacgcaagttggaaaagatggcagatcaggctatgacccaaatgtacaaacaggcaagatctgaggacaagagggcaaaagtaactagtgctatgcaaacaatgctcttcactatgcttaggaagcttgataatgatgcacttaacaacattatcaacaatgcgcgtgatggttgtgttccactcaacatcataccattgactacagcagccaaactcatggttgttgtccctgattatggtacctacaagaacacttgtgatggtaacacctttacatatgcatctgcactctgggaaatccagcaagttgttgatgcggatagcaagattgttcaacttagtgaaattaacatggacaattcaccaaatttggcttggcctcttattgttacagctctaagagccaactcagctgttaaactacagaataatgaactgagtccagtagcactacgacagatgtcctgtgcggctggtaccacacaaacagcttgtactgatgacaatgcacttgcctactataacaattcgaagggaggtaggtttgtgctggcattactatcagaccaccaagatctcaaatgggctagattccctaagagtgatggtacaggtacaatttacacagaactggaaccaccttgtaggtttgttacagacacaccaaaagggcctaaagtgaaatacttgtacttcatcaaaggcttaaacaacctaaatagaggtatggtgctgggcagtttagctgctacagtacgtcttcaggctggaaatgctacagaagtacctgccaattcaactgtgctttccttctgtgcttttgcagtagaccctgctaaagcatataaggattacctagcaagtggaggacaaccaatcaccaactgtgtgaagatgttgtgtacacacactggtacaggacaggcaattactgtaacaccagaagctaacatggaccaagagtcctttggtggtgcttcatgttgtctgtattgtagatgccacattgaccatccaaatcctaaaggattctgtgacttgaaaggtaagtacgtccaaatacctaccacttgtgctaatgacccagtgggttttacacttagaaacacagtctgtaccgtctgcggaatgtggaaaggttatggctgtagttgtgaccaactccgcgaacccttgatgcagtctgcggatgcatcaacgtttttaaacgggtttgcggtgtaagtgcagcccgtcttacaccgtgcggcacaggcactagtactgatgtcgtctacagggcttttgatatttacaacgaaaaagttgctggttttgcaaagttcctaaaaactaattgctgtcgcttccaggagaaggatgaggaaggcaatttattagactcttactttgtagttaagaggcatactatgtctaactaccaacatgaagagactatttataacttggttaaagattgtccagcggttgctgtccatgactttttcaagtttagagtagatggtgacatggtaccacatatatcacgtcagcgtctaactaaatacacaatggctgatttagtctatgctctacgtcattttgatgagggtaattgtgatacattaaaagaaatactcgtcacatacaattgctgtgatgatgattatttcaataagaaggattggtatgacttcgtagagaatcctgacatcttacgcgtatatgctaacttaggtgagcgtgtacgccaatcattattaaagactgtacaattctgcgatgctatgcgtgatgcaggcattgtaggcgtactgacattagataatcaggatcttaatgggaactggtacgatttcggtgatttcgtacaagtagcaccaggctgcggagttcctattgtggattcatattactcattgctgatgcccatcctcactttgactagggcattggctgctgagtcccatatggatgctgatctcgcaaaaccacttattaagtgggatttgctgaaatatgattttacggaagagagactttgtctcttcgaccgttattttaaatattgggaccagacataccatcccaattgtattaactgtttggatgataggtgtatccttcattgtgcaaactttaatgtgttattttctactgtgtttccacctacaagttttggaccactagtaagaaaaatatttgtagatggtgttccttttgttgtttcaactggataccattttcgtgagttaggagtcgtacataatcaggatgtaaacttacatagctcgcgtctcagtttcaaggaacttttagtgtatgctgctgatccagctatgcatgcagcttctggcaatttattgctagataaacgcactacatgcttttcagtagctgcactaacaaacaatgttgcttttcaaactgtcaaacccggtaattttaataaagacttttatgactttgctgtgtctaaaggtttctttaaggaaggaagttctgttgaactaaaacacttcttctttgctcaggatggcaacgctgctatcagtgattatgactattatcgttataatctgccaacaatgtgtgatatcagacaactcctattcgtagttgaagttgttgataaatactttgattgttacgatggtggctgtattaatgccaaccaagtaatcgttaacaatctggataaatcagctggtttcccatttaataaatggggtaaggctagactttattatgactcaatgagttatgaggatcaagatgcacttttcgcgtatactaagcgtaatgtcatccctactataactcaaatgaatcttaagtatgccattagtgcaaagaatagagctcgcaccgtagctggtgtctctatctgtagtactatgacaaatagacagtttcatcagaaattattgaagtcaatagccgccactagaggagctactgtggtaattggaacaagcaagttttacggtggctggcataatatgttaaaaactgtttacagtgatgtagaaactccacaccttatgggttgggattatccaaaatgtgacagagccatgcctaacatgcttaggataatggcctctcttgttcttgctcgcaaacataacacttgctgtaacttatcacaccgtttctacaggttagctaacgagtgtgcgcaagtattaagtgagatggtcatgtgtggcggctcactatatgttaaaccaggtggaacatcatccggtgatgctacaactgcttatgctaatagtgtctttaacatttgtcaagctgttacagccaatgtaaatgcacttctttcaactgatggtaataagatagctgacaagtatgtccgcaatctacaacacaggctctatgagtgtctctatagaaatagggatgttgatcatgaattcgtggatgagttttacgcttacctgcgtaaacatttctccatgatgattctttctgatgatgccgttgtgtgctataacagtaactatgcggctcaaggtttagtagctagcattaagaactttaaggcagttctttattatcaaaataatgtgttcatgtctgaggcaaaatgttggactgagactgaccttactaaaggacctcacgaattttgctcacagcatacaatgctagttaaacaaggagatgattacgtgtacctgccttacccagatccatcaagaatattaggcgcaggctgttttgtcgatgatattgtcaaaacagatggtacacttatgattgaaaggttcgtgtcactggctattgatgcttacccacttataaaacatcctaatcaggagtatgctgatgtctttcacttgtatttacaatacattagaaagttacatgatgagcttactggccacatgttggacatgtattccgtaatgctaactaatgataacacctcacggtactgggaacctgagttttatgaggctatgtacacaccacatacagtcttgcaggctgtaggtgcttgtgtattgtgcaattcacagacttcacttcgttgcggtgcctgtattaggagaccattcctatgttgcaagtgctgctatgaccatgtcatttcaacatcacacaaattagtgttgtctgttaatccctatgtttgcaatgccccaggttgtgatgtcactgatgtgacacaactgtatctaggaggtatgagctattattgcaagtcacataagcctcccattagttttccattatgtgctaatggtcaggtttttggtttatacaaaaacacatgtgtaggcagtgacaatgtcactgacttcaatgcgatagcaacatgtgattggactaatgctggcgattacatacttgccaacacttgtactgagagactcaagcttttcgcagcagaaacgctcaaagccactgaggaaacatttaagctgtcatatggtattgccactgtacgcgaagtactctctgacagagaattgcatctttcatgggaggttggaaaacctagaccaccattgaacagaaactatgtctttactggttaccgtgtaactaaaaatagtaaagtacagattggagagtacacctttgaaaaaggtgactatggtgatgctgttgtgtacagaggtactacgacatacaagttgaatgttggtgattactttgtgttgacatctcacactgtaatgccacttagtgcacctactctagtgccacaagagcactatgtgagaattactggcttgtacccaacactcaacatctcagatgagttttctagcaatgttgcaaattatcaaaaggtcggcatgcaaaagtactctacactccaaggaccacctggtactggtaagagtcattttgccatcggacttgctctctattacccatctgctcgcatagtgtatacggcatgctctcatgcagctgttgatgccctatgtgaaaaggcattaaaatatttgcccatagataaatgtagtagaatcatacctgcgcgtgcgcgcgtagagtgttttgataaattcaaagtgaattcaacactagaacagtatgttttctgcactgtaaatgcattgccagaaacaactgctgacattgtagtctttgatgaaatctctatggctactaattatgacttgagtgttgtcaatgctagacttcgtgcaaaacactacgtctatattggcgatcctgctcaattaccagccccccgcacattgctgactaaaggcacactagaaccagaatattttaattcagtgtgcagacttatgaaaacaataggtccagacatgttccttggaacttgtcgccgttgtcctgctgaaattgttgacactgtgagtgctttagtttatgacaataagctaaaagcacacaaggataagtcagctcaatgcttcaaaatgttctacaaaggtgttattacacatgatgtttcatctgcaatcaacagacctcaaataggcgttgtaagagaatttcttacacgcaatcctgcttggagaaaagctgtttttatctcaccttataattcacagaacgctgtagcttcaaaaatcttaggattgcctacgcagactgttgattcatcacagggttctgaatatgactatgtcatattcacacaaactactgaaacagcacactcttgtaatgtcaaccgcttcaatgtggctatcacaagggcaaaaattggcattttgtgcataatgtctgatagagatctttatgacaaactgcaatttacaagtctagaaataccacgtcgcaatgtggctacattacaagcagaaaatgtaactggactttttaaggactgtagtaagatcattactggtcttcatcctacacaggcacctacacacctcagcgttgatataaagttcaagactgaaggattatgtgttgacataccaggcataccaaaggacatgacctaccgtagactcatctctatgatgggtttcaaaatgaattaccaagtcaatggttaccctaatatgtttatcacccgcgaagaagctattcgtcacgttcgtgcgtggattggctttgatgtagagggctgtcatgcaactagagatgctgtgggtactaacctacctctccagctaggattttctacaggtgttaacttagtagctgtaccgactggttatgttgacactgaaaataacacagaattcaccagagttaatgcaaaacctccaccaggtgaccagtttaaacatcttataccactcatgtataaaggcttgccctggaatgtagtgcgtattaagatagtacaaatgctcagtgatacactgaaaggattgtcagacagagtcgtgttcgtcctttgggcgcatggctttgagcttacatcaatgaagtactttgtcaagattggacctgaaagaacgtgttgtctgtgtgacaaacgtgcaacttgcttttctacttcatcagatacttatgcctgctggaatcattctgtgggttttgactatgtctataacccatttatgattgatgttcagcagtggggctttacgggtaaccttcagagtaaccatgaccaacattgccaggtacatggaaatgcacatgtggctagttgtgatgctatcatgactagatgtttagcagtccatgagtgctttgttaagcgcgttgattggtctgttgaataccctattataggagatgaactgagggttaattctgcttgcagaaaagtacaacacatggttgtgaagtctgcattgcttgctgataagtttccagttcttcatgacattggaaatccaaaggctatcaagtgtgtgcctcaggctgaagtagaatggaagttctacgatgctcagccatgtagtgacaaagcttacaaaatagaggaactcttctattcttatgctacacatcacgataaattcactgatggtgtttgtttgttttggaattgtaacgttgatcgttacccagccaatgcaattgtgtgtaggtttgacacaagagtcttgtcaaacttgaacttaccaggctgtgatggtggtagtttgtatgtgaataagcatgcattccacactccagctttcgataaaagtgcatttactaatttaaagcaattgcctttcttttactattctgatagtccttgtgagtctcatggcaaacaagtagtgtcggatattgattatgttccactcaaatctgctacgtgtattacacgatgcaatttaggtggtgctgtttgcagacaccatgcaaatgagtaccgacagtacttggatgcatataatatgatgatttctgctggatttagcctatggatttacaaacaatttgatacttataacctgtggaatacatttaccaggttacagagtttagaaaatgtggcttataatgttgttaataaaggacactttgatggacacgccggcgaagcacctgtttccatcattaataatgctgtttacacaaaggtagatggtattgatgtggagatctttgaaaataagacaacacttcctgttaatgttgcatttgagctttgggctaagcgtaacattaaaccagtgccagagattaagatactcaataatttgggtgttgatatcgctgctaatactgtaatctgggactacaaaagagaagccccagcacatgtatctacaataggtgtctgcacaatgactgacattgccaagaaacctactgagagtgcttgttcttcacttactgtcttgtttgatggtagagtggaaggacaggtagacctttttagaaacgcccgtaatggtgttttaataacagaaggttcagtcaaaggtctaacaccttcaaagggaccagcacaagctagcgtcaatggagtcacattaattggagaatcagtaaaaacacagtttaactactttaagaaagtagacggcattattcaacagttgcctgaaacctactttactcagagcagagacttagaggattttaagcccagatcacaaatggaaactgactttctcgagctcgctatggatgaattcatacagcgatataagctcgagggctatgccttcgaacacatcgtttatggagatttcagtcatggacaacttggcggtcttcatttaatgataggcttagccaagcgctcacaagattcaccacttaaattagaggattttatccctatggacagcacagtgaaaaattacttcataacagatgcgcaaacaggttcatcaaaatgtgtgtgttctgtgattgatcttttacttgatgactttgtcgagataataaagtcacaagatttgtcagtgatttcaaaagtggtcaaggttacaattgactatgctgaaatttcattcatgctttggtgtaaggatggacatgttgaaaccttctacccaaaactacaagcaagtcaagcgtggcaaccaggtgttgcgatgcctaacttgtacaagatgcaaagaatgcttcttgaaaagtgtgaccttcagaattatggtgaaaatgctgttataccaaaaggaataatgatgaatgtcgcaaagtatactcaactgtgtcaatacttaaatacacttactttagctgtaccctacaacatgagagttattcactttggtgctggctctgataaaggagttgcaccaggtacagctgtgctcagacaatggttgccaactggcacactacttgtcgattcagatcttaatgacttcgtctccgacgcagattctactttaattggagactgtgcaacagtacatacggctaataaatgggaccttattattagcgatatgtatgaccctaggaccaaacatgtgacaaaagagaatgactctaaagaagggtttttcacttatctgtgtggatttataaagcaaaaactagccctgggtggttctatagctgtaaagataacagagcattcttggaatgctgacctttacaagcttatgggccatttctcatggtggacagcttttgttacaaatgtaaatgcatcatcatcggaagcatttttaattggggctaactatcttggcaagccgaaggaacaaattgatggctataccatgcatgctaactacattttctggaggaacacaaatcctatccagttgtcttcctattcactctttgacatgagcaaatttcctcttaaattaagaggaactgctgtaatgtctcttaaggagaatcaaatcaatgatatgatttattctcttctggaaaaaggtaggcttatcattagagaaaacaacagagttgtggtttcaagtgatattcttgttaacaactaaacgaacatgtttattttcttattatttcttactctcactagtggtagtgaccttgaccggtgcaccacttttgatgatgttcaagctcctaattacactcaacatacttcatctatgaggggggtttactatcctgatgaaatttttagatcagacactctttatttaactcaggatttatttcttccattttattctaatgttacagggtttcatactattaatcatacgtttggcaaccctgtcataccttttaaggatggtatttattttgctgccacagagaaatcaaatgttgtccgtggttgggtttttggttctaccatgaacaacaagtcacagtcggtgattattattaacaattctactaatgttgttatacgagcatgtaactttgaattgtgtgacaaccctttctttgctgtttctaaacccatgggtacacagacacatactatgatattcgataatgcatttaattgcactttcgagtacatatctgatgccttttcgcttgatgtttcagaaaagtcaggtaattttaaacacttacgagagtttgtgtttaaaaataaagatgggtttctctatgtttataagggctatcaacctatagatgtagttcgtgatctaccttctggttttaacactttgaaacctatttttaagttgcctcttggtattaacattacaaattttagagccattcttacagccttttcacctgctcaagacatttggggcacgtcagctgcagcctattttgttggctatttaaagccaactacatttatgctcaagtatgatgaaaatggtacaatcacagatgctgttgattgttctcaaaatccacttgctgaactcaaatgctctgttaagagctttgagattgacaaaggaatttaccagacctctaatttcagggttgttccctcaggagatgttgtgagattccctaatattacaaacttgtgtccttttggagaggtttttaatgctactaaattcccttctgtctatgcatgggagagaaaaaaaatttctaattgtgttgctgattactctgtgctctacaactcaacatttttttcaacctttaagtgctatggcgtttctgccactaagttgaatgatctttgcttctccaatgtctatgcagattcttttgtagtcaagggagatgatgtaagacaaatagcgccaggacaaactggtgttattgctgattataattataaattgccagatgatttcatgggttgtgtccttgcttggaatactaggaacattgatgctacttcaactggtaattataattataaatataggtatcttagacatggcaagcttaggccctttgagagagacatatctaatgtgcctttctcccctgatggcaaaccttgcaccccacctgctcttaattgttattggccattaaatgattatggtttttacaccactactggcattggctaccaaccttacagagttgtagtactttcttttgaacttttaaatgcaccggccacggtttgtggaccaaaattatccactgaccttattaagaaccagtgtgtcaattttaattttaatggactcactggtactggtgtgttaactccttcttcaaagagatttcaaccatttcaacaatttggccgtgatgtttctgatttcactgattccgttcgagatcctaaaacatctgaaatattagacatttcaccttgctcttttgggggtgtaagtgtaattacacctggaacaaatgcttcatctgaagttgctgttctatatcaagatgttaactgcactgatgtttctacagcaattcatgcagatcaactcacaccagcttggcgcatatattctactggaaacaatgtattccagactcaagcaggctgtcttataggagctgagcatgtcgacacttcttatgagtgcgacattcctattggagctggcatttgtgctagttaccatacagtttctttattacgtagtactagccaaaaatctattgtggcttatactatgtctttaggtgctgatagttcaattgcttactctaataacaccattgctatacctactaacttttcaattagcattactacagaagtaatgcctgtttctatggctaaaacctccgtagattgtaatatgtacatctgcggagattctactgaatgtgctaatttgcttctccaatatggtagcttttgcacacaactaaatcgtgcactctcaggtattgctgctgaacaggatcgcaacacacgtgaagtgttcgctcaagtcaaacaaatgtacaaaaccccaactttgaaatattttggtggttttaatttttcacaaatattacctgaccctctaaagccaactaagaggtcttttattgaggacttgctctttaataaggtgacactcgctgatgctggcttcatgaagcaatatggcgaatgcctaggtgatattaatgctagagatctcatttgtgcgcagaagttcaatggacttacagtgttgccacctctgctcactgatgatatgattgctgcctacactgctgctctagttagtggtactgccactgctggatggacatttggtgctggcgctgctcttcaaataccttttgctatgcaaatggcatataggttcaatggcattggagttacccaaaatgttctctatgagaaccaaaaacaaatcgccaaccaatttaacaaggcgattagtcaaattcaagaatcacttacaacaacatcaactgcattgggcaagctgcaagacgttgttaaccagaatgctcaagcattaaacacacttgttaaacaacttagctctaattttggtgcaatttcaagtgtgctaaatgatatcctttcgcgacttgataaagtcgaggcggaggtacaaattgacaggttaattacaggcagacttcaaagccttcaaacctatgtaacacaacaactaatcagggctgctgaaatcagggcttctgctaatcttgctgctactaaaatgtctgagtgtgttcttggacaatcaaaaagagttgacttttgtggaaagggctaccaccttatgtccttcccacaagcagccccgcatggtgttgtcttcctacatgtcacgtatgtgccatcccaggagaggaacttcaccacagcgccagcaatttgtcatgaaggcaaagcatacttccctcgtgaaggtgtttttgtgtttaatggcacttcttggtttattacacagaggaacttcttttctccacaaataattactacagacaatacatttgtctcaggaaattgtgatgtcgttattggcatcattaacaacacagtttatgatcctctgcaacctgagcttgactcattcaaagaagagctggacaagtacttcaaaaatcatacatcaccagatgttgatcttggcgacatttcaggcattaacgcttctgtcgtcaacattcaaaaagaaattgaccgcctcaatgaggtcgctaaaaatttaaatgaatcactcattgaccttcaagaattgggaaaatatgagcaatatattaaatggccttggtatgtttggctcggcttcattgctggactaattgccatcgtcatggttacaatcttgctttgttgcatgactagttgttgcagttgcctcaagggtgcatgctcttgtggttcttgctgcaagtttgatgaggatgactctgagccagttctcaagggtgtcaaattacattacacataaacgaacttatggatttgtttatgagattttttactcttggatcaattactgcacagccagtaaaaattgacaatgcttctcctgcaagtactgttcatgctacagcaacgataccgctacaagcctcactccctttcggatggcttgttattggcgttgcatttcttgctgtttttcagagcgctaccaaaataattgcgctcaataaaagatggcagctagccctttataagggcttccagttcatttgcaatttactgctgctatttgttaccatctattcacatcttttgcttgtcgctgcaggtatggaggcgcaatttttgtacctctatgccttgatatattttctacaatgcatcaacgcatgtagaattattatgagatgttggctttgttggaagtgcaaatccaagaacccattactttatgatgccaactactttgtttgctggcacacacataactatgactactgtataccatataacagtgtcacagatacaattgtcgttactgaaggtgacggcatttcaacaccaaaactcaaagaagactaccaaattggtggttattctgaggataggcactcaggtgttaaagactatgtcgttgtacatggctatttcaccgaagtttactaccagcttgagtctacacaaattactacagacactggtattgaaaatgctacattcttcatctttaacaagcttgttaaagacccaccgaatgtgcaaatacacacaatcgacggctcttcaggagttgctaatccagcaatggatccaatttatgatgagccgacgacgactactagcgtgcctttgtaagcacaagaaagtgagtacgaacttatgtactcattcgttttggaagaaacaggtacgttaatagttaatagcgtacttctttttcttgctttcgtggtattcttgctagtcacactagccatccttactgcgcttcgattgtgtgcgtactgctgcaatattgttaacgtgagtttagtaaaaccaacggtttacgtctactcgcgtgttaaaaatctgaactcttctgaaggagttcctgatcttctggtctaaacgaactaactattattattattctgtttggaactttaacattgcttatcatggcagacaacggtactattaccgttgaggagcttaaacaactcctggaacaatggaacctagtaataggtttcctatgcctagcctggattatgttactacaatttgcctattctaatcggaacaggtttttgtacataataaagcttgttttcctctggctcttgtggccagtaacacttgcttgttttgtgcttgctgctgtctacagaattaattgggtgactggcgggattgcgattgcaatggcttgtattgtaggcttgatgtggcttagctacttcgttgcttccttcaggctgtttgctcgtacccgctcaatgtggtcattcaacccagaaacaaacattcttctcaatgtgcctctccgggggacaattgtgaccagaccgctcatggaaagtgaacttgtcattggtgctgtgatcattcgtggtcacttgcgaatggccggacactccctagggcgctgtgacattaaggacctgccaaaagagatcactgtggctacatcacgaacgctttcttattacaaattaggagcgtcgcagcgtgtaggcactgattcaggttttgctgcatacaaccgctaccgtattggaaactataaattaaatacagaccacgccggtagcaacgacaatattgctttgctagtacagtaagtgacaacagatgtttcatcttgttgacttccaggttacaatagcagagatattgattatcattatgaggactttcaggattgctatttggaatcttgacgttataataagttcaatagtgagacaattatttaagcctctaactaagaagaattattcggagttagatgatgaagaacctatggagttagattatccataaaacgaacatgaaaattattctcttcctgacattgattgtatttacatcttgcgagctatatcactatcaggagtgtgttagaggtacgactgtactactaaaagaaccttgcccatcaggaacatacgagggcaattcaccatttcaccctcttgctgacaataaatttgcactaacttgcactagcacacactttgcttttgcttgtgctgacggtactcgacatacctatcagctgcgtgcaagatcagtttcaccaaaacttttcatcagacaagaggaggttcaacaagagctctactcgccactttttctcattgttgctgctctagtatttttaatactttgcttcaccattaagagaaagacagaatgaatgagctcactttaattgacttctatttgtgctttttagcctttctgctattccttgttttaataatgcttattatattttggttttcactcgaaatccaggatctagaagaaccttgtaccaaagtctaaacgaacatgaaacttctcattgttttgacttgtatttctctatgcagttgcatatgcactgtagtacagcgctgtgcatctaataaacctcatgtgcttgaagatccttgtaaggtacaacactaggggtaatacttatagcactgcttggctttgtgctctaggaaaggttttaccttttcatagatggcacactatggttcaaacatgcacacctaatgttactatcaactgtcaagatccagctggtggtgcgcttatagctaggtgttggtaccttcatgaaggtcaccaaactgctgcatttagagacgtacttgttgttttaaataaacgaacaaattaaaatgtctgataatggaccccaatcaaaccaacgtagtgccccccgcattacatttggtggacccacagattcaactgacaataaccagaatggaggacgcaatggggcaaggccaaaacagcgccgaccccaaggtttacccaataatactgcgtcttggttcacagctctcactcagcatggcaaggaggaacttagattccctcgaggccagggcgttccaatcaacaccaatagtggtccagatgaccaaattggctactaccgaagagctacccgacgagttcgtggtggtgacggcaaaatgaaagagctcagccccagatggtacttctattacctaggaactggcccagaagcttcacttccctacggcgctaacaaagaaggcatcgtatgggttgcaactgagggagccttgaatacacccaaagaccacattggcacccgcaatcctaataacaatgctgccaccgtgctacaacttcctcaaggaacaacattgccaaaaggcttctacgcagagggaagcagaggcggcagtcaagcctcttctcgctcctcatcacgtagtcgcggtaattcaagaaattcaactcctggcagcagtaggggaaattctcctgctcgaatggctagcggaggtggtgaaactgccctcgcgctattgctgctagacagattgaaccagcttgagagcaaagtttctggtaaaggccaacaacaacaaggccaaactgtcactaagaaatctgctgctgaggcatctaaaaagcctcgccaaaaacgtactgccacaaaacagtacaacgtcactcaagcatttgggagacgtggtccagaacaaacccaaggaaatttcggggaccaagacctaatcagacaaggaactgattacaaacattggccgcaaattgcacaatttgctccaagtgcctctgcattctttggaatgtcacgcattggcatggaagtcacaccttcgggaacatggctgacttatcatggagccattaaattggatgacaaagatccacaattcaaagacaacgtcatactgctgaacaagcacattgacgcatacaaaacattcccaccaacagagcctaaaaaggacaaaaagaaaaagactgatgaagctcagcctttgccgcagagacaaaagaagcagcccactgtgactcttcttcctgcggctgacatggatgatttctccagacaacttcaaaattccatgagtggagcttctgctgattcaactcaggcataaacactcatgatgaccacacaaggcagatgggctatgtaaacgttttcgcaattccgtttacgatacatagtctactcttgtgcagaatgaattctcgtaactaaacagcacaagtaggtttagttaactttaatctcacatagcaatctttaatcaatgtgtaacattagggaggacttgaaagagccaccacattttcatcgaggccacgcggagtacgatcgagggtacagtgaataatgctagggagagctgcctatatggaagagccctaatgtgtaaaattaattttagtagtgctatccccatgtgattttaatagcttcttaggagaatgacaaaaaaaaaaaaaaaaaaaaaaaa

SEQ ID NO: 29809 - DNA, 29749 bp, SARS Coronavirus
ttattaggtttttacctacccaggaaaagccaaccaacctcgatctcttgtagatctgttctctaaacgaactttaaaatctgtgtagctgtcgctcggctgcatgcctagtgcacctacgcagtataaacaataataaattttactgtcgttgacaagaaacgagtaactcgtccctcttctgcagactgcttacggtttcgtccgtgttgcagtcgatcatcagcatacctaggtttcgtccgggtgtgaccgaaaggtaagatggagagccttgttcttggtgtcaacgagaaaacacacgtccaactcagtttgcctgtccttcaggttagagacgtgctagtgcgtggcttcggggactctgtggaagaggccctatcggaggcacgtgaacacctcaaaaatggcacttgtggtctagtagagctggaaaaaggcgtactgccccagcttgaacagccctatgtgttcattaaacgttctgatgccttaagcaccaatcacggccacaaggtcgttgagctggttgcagaaatggacggcattcagtacggtcgtagcggtataacactgggagtactcgtgccacatgtgggcgaaaccccaattgcataccgcaatgttcttcttcgtaagaacggtaataagggagccggtggtcatagctatggcatcgatctaaagtcttatgacttaggtgacgagcttggcactgatcccattgaagattatgaacaaaactggaacactaagcatggcagtggtgcactccgtgaactcactcgtgagctcaatggaggtgcagtcactcgctatgtcgacaacaatttctgtggcccagatgggtaccctcttgattgcatcaaagattttctcgcacgcgcgggcaagtcaatgtgcactctttccgaacaacttgattacatcgagtcgaagagaggtgtctactgctgccgtgaccatgagcatgaaattgcctggttcactgagcgctctgataagagctacgagcaccagacacccttcgcaaattaagaagtgccaagaaaatttgacactttcaaaggggaatgcccaaagtttgtgtttcctcttaactcaaaagtcaaagtcattcaaccacgtgttgaaaagaaaaagactgagggtttcatggggcgtatacgctctgtgtaccctgttgcatctccacaggagtgtaacaatatgcacttgtctaccttgatgaaatgtaatcattgcgatgaagtttcatggcagacgtgcgactttctgaaagccacttgtgaacattgtggcactgaaaatttagttattgaaggacctactacatgtgggtacctacctactaatgctgtagtgaaaatgccatgtcctgcctgtcaagacccagagattggacctgagcatagtgttgcagattatcacaaccactcaaacattgaaactcgactccgcaagggaggtaggactagatgttttggaggctgtgtgtttgcctatgttggctgctataataagcgtgcctactgggttcctcgtgctagtgttgatattggctcaggccatactggcattactggtgacaatgtggagaccttgaatgaggatctccttgagatactgagtcgtgaacgtgttaacattaacattgttggcgattttcatttgaatgaagaggttgccatcattttggcatctttctctgcttctacaagtgcctttattgacactataaagagtcttgattacaagtctttcaaaaccattgttgagtcctgcggtaactataaagttaccaagggaaagcccgtaaaaggtgcttggaacattggacaacagagatcagttttaacaccactgtgtggttttccctcacaggctgctggtgttatcagatcaatttttgcgcgcacacttgatgcagcaaaccactcaattcctgatttgcaaagagcagctgtcaccatacttgatggtatttctgaacagtcattacgtcttgtcgacgccatggtttatacttcagacctgctcaccaacagtgtcattattatggcatatgtaactggtggtcttgtacaacagacttctcagtggttgtctaatcttttgggcactactgttgaaaaactcaggcctatctttgaatggattgaggcgaaacttagtgcaggagttgaatttctcaaggatgcttgggagattctcaaatttctcattacaggtgtttttgacatcgtcaagggtcaaatacaggttgcttcagataacatcaaggattgtgtaaaatgcttcattgatgttgttaacaaggcactcgaaatgtgcattgatcaagtcactatcgctggcgcaaagttgcgatcactcaacttaggtgaagtcttcatcgctcaaagcaagggactttaccgtcagtgtatacgtggcaaggagcagctgcaactactcatgcctcttaaggcaccaaaagaagtaacctttcttgaaggtgattcacatgacacagtactttacctcttgaggaggttgttctcaagaacggtgaactcgaagcactcgagacgcccgttgatagcttcacaaatggagctatcgttggcacaccagtctgtgtaaatggcctcatgctcttagagattaaggacaaagaacaatactgcgcattgtctcctggtttactggctacaaacaatgtctttcgcttaaaagggggtgcaccaattaaaggtgtaacctttggagaagatactgtttgggaagttcaaggttacaagaatgtgagaatcacatttgagcttgatgaacgtgttgacaaagtgcttaatgaaaagtgctctgtctacactgttgaatccggtaccgaagttactgagtttgcatgtgttgtagcagaggctgttgtgaagactttacaaccagtttctgatctccttaccaacatgggtattgatcttgatgagtggagtgtagctacattctacttatttgatgatgctggtgaagaaaacttttcatcacgtatgtattgttccttttaccctccagatgaggaagaagaggacgatgcagagtgtgaggaagaagaaattgatgaaacctgtgaacatgagtacggtacagaggatgattatcaaggtctccctctggaatttggtgcctcagctgaaacagttcgagttgaggaagaagaagaggaagactggctggatgatactactgagcaatcagagattgagccagaaccagaacctacacctgaagaaccagttaatcagtttactggttatttaaaacttactgacaatgttgccattaaatgtgttgacatcgttaaggaggcacaaagtgctaatcctatggtgattgtaaatgctgctaacatacacctgaaacatggtggtggtgtagcaggtgcactcaacaaggcaaccaatggtgccatgcaaaaggagagtgatgattacattaagctaaatggccctcttacagtaggagggtcttgtttgctttctggacataatcttgctaagaagtgtctgcatgttgttggacctaacctaaatgcaggtgaggacatccagcttcttaaggcagcatatgaaaatttcaattcacaggacatcttacttgcaccattgttgtcagcaggcatatttggtgctaaaccacttcagtctttacaagtgtgcgtgcagacggttcgtacacaggtttatattgcagtcaatgacaaagctctttatgagcaggttgtcatggattatcttgataacctgaagcctagagtggaagcacctaaaccagaggagccaccaaacacagaagattccaaaactgagggagaaatctgtcgtacagaagcctgtcgatgtgaagccaaaaattaaggcctgcattgatgaggttaccacaacactggaagaaactaagtttcttaccaataagttactcttgtttgctgatatcaatggtaagctttaccatgattctcagaacatgcttagaggtgaagatatgtctttccttgagaaggatgcaccttacatggtaggtgatgttatcactagtggcgatatcacttgtgttgtaataccctccaaaaaggctggtggcactactgagatgctctcaagagctttgaagaaagtgccagttgatgagtatataaccacgtaccctggacaaggatgtgctggttatacacttgagggaagctaagactgctcttaagaaatgcaaatctgcattttatgtactaccttcagaagcacctaatgctaaggaagagattctaggaactgtatcctggaatttgagagaagtgcttgctcatgctgaagagacaagaaaattaatgcctatatgcatggatgttagagccataatggcaaccatccaacgtaagtataaaggaattaaaattcaagagggcatcgttgactatggtgtccgattcttcttttatactagtaaagagcctgtagcttctattattacgaagctgaactctctaaatgagccgcttgtcacaatgccaattggttatgtgacacatggttttaatcttgaagaggctgcgcgctgtatgcgttctcttaaagctcctgccgtagtgtcagtatcatcaccagatgctgttactacatataatggatacctcacttcgtcatcaaagacatctgaggagcactttgtagaaacagtttctttggctggctcttacagagattggtcctattcaggacagcgtacagagttaggtgttgaatttcttaagcgtggtgacaaaattgggtaccacactctggagagcccccgtcgagtttcatcttgacggtgaggttctttcacttgacaaactaaagagtctcttatccctgcgggaggttaagactataaaagtgttcacaactgtggacaacactaatctccacacacagcttgtggatatgtctatgacatatggactgcagtttggtccaacatacttggatggtgctgatgttacaaaaattaaacctcatgtaaatcatgagggtaagactttctttgtactacctagtgatgacacactacgtagtgaagctttcgagtactaccatactcttgatgagagttttcttggtaggtacatgtctgctttaaaccacacaaagaaatggaaatttcctcaagttggtggtttaacttcaattaaatgggctgataacaattgttatttgtctagtgttttattagcacttcaacagcttgaagtcaaattcaatgcaccagcacttcaagaggcttattatagagcccgtgctggtgatgctgctaacttttgtgcactcatactcgcttacagtaataaaactgttggcgagcttggtgatgtcagagaaactatgacccatcttctacagcatgctaatttggaatctgcaaagcgagttcttaatgtggtgtgtaaacattgtggtcagaaaactactaccttaacgggtgtagaagctgtgatgtatatgggtactctatcttatgataatcttaagacaggtgtttccattccatgtgtgtgtggtcgtgatgctacacaatatctagtacaacaagagtcttcttttgttatgatgtctgcaccacctgctgagtataaattacagcaaggtacattcttatgtgcgaatgagtacactggtaactatcagtgtggtcattacactcatataactgctaaggagaccctctatcgtattgacggagctcaccttacaaagatgtcagagtacaaaggaccagtgactgatgttttctacaaggaaacatcttacactacaaccatcaagcctgtgtcgtataaactcgatggtgttacttacacagagattgaaccaaaattggatgggtattataaaaaggataatgcttactatacagagcagcctatagaccttgtaccaactcaaccattaccaaatgcgagttttgataatttcaaactcacatgttctaacacaaaatttgctgatgatttaaatcaaatgacaggcttcacaaagccagcttcacgagagctatctgtcgcattcttcccagacttgaatggcgatgtagtggctattgactatagacactattcagcgagtttcaagaaaggtgctaaattactgcataggccaattgtttggcacattaacccggctacaaccaagacaacgttcaaaccaaacacttggtgtttacgttgtctttggagtacaaagccagtagatacttcaaattcatttgaagttctggcagtagaagacacacaaggaatggacaatctcgcttgtgaaagtcaacaaacccacctctgaagaagtagtggaaaatcctaccatacagaaggaagtcatagagtgtgacgtgaaaactaccgaagttgtaggcaaatgtcatacttaaaccatcagatgaaggtgttaaagtaacacaagagttaggtcatgaggatcttatggctgcttatgtggaaaacacaagcattaccattaagaaacctaatgagctttcactagccttaggtttaaaaacaattgccactcatggtattgctgcagttaatagtgttccttggagtaaaattttggcttatgtcaaaccattcttaggacaagcagcaattacaacatcaaattgcgctaagagattagcacaacgtgtgtttaacaattatatgccttatgtgtttacattattgttccaattgtgtacttttactaaaagtaccaattctagaattagagcttcactacctacaactattgctaaaaatagtgttaagagtgttgctaaattatgtttggatgccggcattaattatgtgaagtcacccaaattttctaaattgttcacaatcgctatgtggctattgttgttaagtatttgcttaggttctctaatctgtgtaactgctgcttttggtgtactcttatctaattttggtgctccttcttattgtaatggcgttagagaattgtatcttaattcgtctaacgttactgctatggatttctgtgaaggttcttttccttgcagcatttgtttaagtggattagactcccttgattcttatccagctcttgaaaccattcaggtgacgatttcatcgtacaagctagacttgacaattttaggtctggccgctgagtgggttttggcatatatgttgttcacaaaattcttttatttattaggtctttcagctataatgcaggtgttctttggctattttgctagtcatttcatcagcaattcttggctcatgtggtttatcattagtattgtacaaatggcacccgtttctgcaatggttaagatgtacatcttctttgcttctttctactacatatggaagagctatgttcatatcatggatggttgcacctcttcgacttgcatgatgtgctataagcgcaatcgtgccacacgcgttgagtgtacaactattgttaatggcatgaagagatctttctatgtctatgcaaatggaggccgtggcttctgcaagactcacaattggaattgtctcaattgtgacacattttgcactggtagtacattcattagtgatgaagttgctcgtgatttgtcactccagtttaaaagaccaatcaaccctactgaccagtcatcgtatattgttgatagtgttgctgtgaaaaatggcgcgcttcacctctacttcgacaaggctggtcaaaagacctatgagagacatccgctctcccattttgtcaatttagacaatttgagagctaacaaacactaaaggttcactgcctattaatgccatagtttttgatggcaagtccaaatacgacgagtctgcttctaagtctgcttctgtgtactacagtcagctgatgtgccaacctattctgttgcttgaccaagctcttgtatcagacgttggagatagtactgaagtttccgttaagatgtttgatgcttaagtcgacaccttttcagcaacttttagtgttcctatggaaaaacttaaggcacttgttgctacagctcacagcgagttagcaaagggtgtagcttttagatggtgtcctttctacattcgtgtcagctgcccgacaaggtgttgttgataccgatgttgacacaaaggatgttattgaatgtctcaaactttcacatcactctgacttagaagtgacaggtgacagttgtaacaatttcatgctcgcctataataaggttgaaaacatgacgcccagagatcttggcgcatgtattgactgtaatgcaaggcatatcaatgcccaagtagcaaaaagtcacaatgtttcactcatctggaatgtaaaagactacgtgtctttatctgaacagctgcgtaaacaaattcgtagtgccgccaagaagaacaacataccttttagactaacttgtgctacaactagacaggttgtcaatgtcataactactaaaatctcactcaagggtggtaagattgttagtacttgttttaaacttatgcttaaggccacattattgtgcgttcttgctgcattggtttgttatatcgttatgccagtacatacattgtcaatccatgatggttacacaaatgaaatcattggttacaaagccattcaggatggtgtcactcgtgacatcatttctactgatgattgttttgcaaataaacatgctggttttgacgcatggtttagccagcgtggtggttcatacaaaaatgacaaaagctgccctgtagtagctgctatcattacaagagagattggtttcatagtgcctggcttaccgggtactgtgctgagagcaatcaatggtgacttcttgcattttctacctcgtgtttttagtgctgttggcaacatttgctacacaccttccaaactcattgagtatagtgattttgctacctctgcttgcgttcttgctgctgagtgtacaatttttaaggatgctatgggcaaacctgtgccatattgttatgacactaatttgctagagggttctatttcttatagtgagcttcgtccagacactcgttatgtgcttatggatggttccatcatacagtttcctaacacttacctggagggttctgttagagtagtaacaacttttgatgctgagtactgtagacatggtacatgcgaaaggtcagaagtaggtatttgcctatctaccagtggtagatgggttcttaataatgagcattacagagctctatcaggagttttctgtggtgttgatgcgatgaatctcatagctaacatctttactcctcttgtgcaacctgtgggtgctttagatgtgtctgcttcagtagtggctggtggtattattgccatattggtgacttgtgctgcctactactttatgaaattcagacgtgtttttggtgagtacaaccatgttgttgctgctaatgcacttttgtttttgatgtctttcactatactctgtctggtaccagcttacagctttctgccgggagtctactcagtcttttacttgtacttgacattctatttcaccaatgatgtttcattcttggctcaccttcaatggtttgccatgttttctcctattgtgcctttttggataacagcaatctatgtattctgtatttctctgaagcactgccattggttctttaacaactatcttaggaaaagagtcatgtttaatggagttacatttagtaccttcgaggaggctgctttgtgtacctttttgctcaacaaggaaatgtacctaaaattgcgtagcgagacactgttgccacttacacagtataacaggtatcttgctctatataacaagtacaagtatttcagtggagccttagatactaccagctatcgtgaagcagcttgctgccacttagcaaaggctctaaatgactttagcaactcaggtgctgatgttctctaccaaccaccacagacatcaatcacttctgctgttctgcagagtggttttaggaaaatggcattcccgtcaggcaaagttgaagggtgcatggtacaagtaacctgtggaactacaactcttaatggattgtggttggatgacacagtatactgtccaagacatgtcatttgcacagcagaagacatgcttaatcttaactatgaagatctgctcattcgcaaatccaaccatagctttcttgttcaggctggcaatgttcaacttcgtgttattggccattctatgcaaaattgtctgcttaggcttaaagttgatacttctaaccctaagacacccaagtataaatttgtccgtatccaacctggtcaaacattttcagttctagcatgctacaatggttcaccatctggtgtttatcagtgtgccatgagacctaatcataccattaaaggttctttccttaatggatcatgtggtagtgttggttttaacattgattatgattgcgtgtctttctgctatatgcatcatatggagcttccaacaggagtacacgctggtactgacttagaaggtaagttctatggtccatttgttgacagacaaactgcacaggctgcaggtacagacacaaccataacataaatgtttggcatggctgtatgctgctgttatcaatggtgataggtggtttcttaatagattcaccactactttgaatgactttaaccttgtggcaatgaagtgcaactatgaacctttgacacaagatcatgttgacatattgggacctctttctgctcaaacaggaattgccgtcttagatatgtgtgctgctttgaaagagctgctgcagaatggtatgaatggtcgtactatccttggtagcactattttagaagatgagtttacaccatttgatgttgttagacaatgctctggtgttaccttccaaggtaagttcaagaaaattgttaagggcactcatcattggatgcttttaactttcttgacatcactattgattcttgttcaaagtacacagtggtcactgtttttctttgtttacgagaatgctttcttgccattcactcttggtattatggcaattgctgcatgtgctatgctgcttgttaagcataagcacgcattcttgtgcttgtttctgttaccttctcttgcaacagttgcttactttaatatggtctacatgcctgctagctgggtgatgcgtatcatgacatggcttgaattggctgacactagcttgtctggttataggcttaaggattgtgttatgtatgcttcagctttagttttgcttattctcatgacagctcgcactgtttatgatgatgctgctagacgtgtttggacactgatgaatgtcattacacttgtttacaaagtctactatggtaatgctttagatcaagctatttccatgtgggccttagttatttctgtaacctctaactattctggtgtcgttacgactaccatgtttttagctagagctatagtgtttgtgtgtgttgagtattacccattgttatttattactggcaacaccttacagtgtatcatgcttgtttattgtttcttaggctattgttgctgctgctactttggccttttctgtttactcaaccgttacttcaggcttactcttggtgtttatgactacttggtctctacacaagaatttaggtatatgaactcccaggggcttttgcctcctaagagtagtattgatgctttcaagcttaaccattaagttgttgggtattggaggtaaaccatgtatcaaggttgctactgtaccagtctaaaatgtctgacgtaaagtgcacatctgcggtactgctctcggttcttcaacaacttagagtagagtcatcttctaaattgtgggcacaatgtgtacaactccacaatgatattcttcttgcaaaagacacaactgaagctttcgagaagatggtttctcttttgtctgttttgctatccatgcagggtgctgtagacattaataggttgtgcgaggaaatgctcgataaccgtgctactcttcaggctattgcttcagaatttagttctttaccatcatatgccgcttatgccactgcccaggaggcctatgagcaggctgtagctaatggtgattctgaagtcgttctcaaaaagttaaagaaatctttgaatgtggctaaatctgagtttgaccgtgatgctgccatgcaacgcaagttggaaaagatggcagatcaggctatgacccaaatgtacaaacaggcaagatctgaggacaagagggcaaaagtaactagtgctatgcaaacaatgctcttcactatgcttaggaagcttgataatgatgcacttaacaacattatcaacaatgcgcgtgatggttgtgttccactcaacatcataccattgactacagcagccaaactcatggttgttgtccctgattatggtacctacaagaacacttgtgatggtaacacctttacatatgcatctgcactctgggaaatccagcaagttgttgatgcggatagcaagattgttcaacttagtgaaattaacatggacaattcaccaaatttggcttggcctcttattgttacagctctaagagccaactcagctgttaaactacagaatagtgaactgagtccagtagcactacgacagatgtcctgtgcggctggtaccacacaaacagcttgtactgatgacaatgcacttgcctactataacaatccgaagggagataggtttgtgctggcattactatcaggccaccaagatctcaaatgggctagattccctaagagtgatggtacaggtacaatttacacagaactggacccaccttgtaggtttgttacagacacaccaaaagggcctaaagtgaaatacttgtacttcatcaaaggcttaaacaacctaaatagaggtatggtgctgggcagtttagctgctacagtacgtcttcaggctggaaatgctacagaagtacctgccaattcagctgtgctttccttctgtgcttttgcagtagaccctgctaaagcatataaggattacctagcaagtggaggacaaccaatcaccaactgtgtgaagatgttgtgtacacacactggtacaggacaggcaattactgtaacaccagaagctaacatggaccaagagtcctttggtggtgcttcatgttgtctgtattgtagatgccacattgaccatccaaatcctaaaggattctgtgacttgaaaggtaagtacgtccaaatacctaccacttgtgctaatgacccagtgggttttacacttagaaacacagtctgtaccgtctgcggaatgtgaaaaggttatggctgtagttgtgaccaactccgcgaacccttgatgcagtctgcggacgcatcaacgtttttaaacgggtttgcggtgtaagtgcagcccgtcttacaccgtgcggcacaggcactagtactgatgtcgtctacagggcttttgatatttacaacgaaagagttgctggttttgcaaagttcctaaaaactaattgctgtcgcttccaggagaaggatgaggaaggcaatttattagactcttactttgtagttaagaggcatactatgtctaactaccaacatgaagagactatttataacttggttaaagattgtccagcggttgctgtccatgactttttcaagtttagagtagatggtgacatggtaccacatatatcacgtcagcgtctaactaaatacacaatggctgatttagtctatgctctacgtcattttgatgagggtaattgtgatacattaaaagaaatactcgtcacatacaattgctgtgatgatgattatttcaataagaaggattggtatgacttcgtagagaatcctgacatcttacgcgtatatgctaacttaggtgagcgtgtacgccaatcattattaaggactgtacaattctgcgatgctatgcgtgatgcaggcattgtaggcgtactgacattagataatcaggatcttaatgggaactggtacgatttcggagatttcgtacgagtagcacccaggctgcggagttcctattgtggattcatattactcattgctgatgccccatcctcactttgactagggccattggctgctgagtcccatatggatgctgatctcgcaaaacccacttattaagtgggatttgctgaaatatgattttacggaagagagactttgtctcttcgaccgttattttaaatattgggacccagacatacccatcccaattgtattaactgtttggatgataggtgtatccttcattgtgcaaactttaatgtgttattttctactgtgtttccacctacaagttttggaccactagtaagaaaaatatttgtagatggtgctccttttgttgtttcaactggataccattttcgtgagttaggagtcgtacataatcaggatgtaaacttacatagctcgcgtctcagtttcaaggaacttttagtgtatgctgctgatccagctatgcatgcagcttctggcaatttattgctagataaacgcactacatgcttttcagtagctgcactaacaaacaatgttgcttttcaaactgtcaaacccggtaattttaataaagacttttatgactttgctgtgtctaaaggtttctttaaggaaggaagttctgttgaactaaaacacttcttctttgctcaggatggcaacgctgctatcagtgattatgactattatcgttataatctgccaacaatgtgtgatatcagacaactcctattcgtagttgaagttgttgataaatactttgattgtcacgatggtggctgtattaatgccaaccaagtaatcgttaacaatctggataaatcagctggtttcccatttaataaatggggtaaggctagactttattatgactcaatgagttatgaggatcaagatgcacttgtcgcgtatactaagcgtaatgtcatccctactataactcaaatgaatcttaagtatgccattagtgcaaagaatagagctcgcaccgtagctggtgtctctatctgtagtactatgacaaatagacagtttcatcagaaattattgaagtcaatagccgccactagaggagctactgtggtaattggaacaagcaagttttacggtggctggcataatatgttaaaaactgtttacagtgatgtagaaactccacaccttatgggttgggattatccaaaatgtgacagagccatgcctaacatgcttaggataatggcctctcttgttcttgctcgcaaacataacacttgctgtaacttatcacaccgtttctacaggttagctaacgagtgtgcgcaagtattaagtgagatggtcatgtgtggcggctcactatatgttaaaccaggtggaacatcatccggtgatgctacaactgcttatgctaatagtgtctttaacatttgtcaagctgttacagccaatgtaaatgcacttctttcaactgatggtaataagatagctgacaagtatgtccgcaatctacaacacaggctctatgagtgtctctatagaaatagggatgttgatcatgaattcgtggatgagttttacgcttacctgcgtaaacatttctccatgatgattctttctgatgatgccgttgtgtgctataacagtaactatgcggctcaaggtttagtagctagcattaagaactttaaggcagttctttattatcaaaataatgtgttcatgtctgaggcaaaatgttggactgagactgactttactaaaggacctcacgaattttgctcacagcatacaatgctagttaaacaaggagatgattacgtgtacctgccttacccagatccatcaagaatattaggcgcaggctgttttgtcgatgatattgtcaaaacagatggtacacttatgattgaaaggttcgtgtcactggctattgatgcttacccacttacaaaacatcctaatcaggagtatgctgatgtctttcacttgtatttacaatacattagaaagttacatgatgagcttactggccacatgttggacatgtattccgtaatgctaactaatgataacacctcacggtactgggaacctgagttttatgaggctatgtacacaccacatacagtcttgcaggctgtaggtgcttgtgtattgtgcaattcacagacttcacttcgttgcggtgcctgtattaggagaccattcctatgttgcaagtgctgctatgaccatgtcatttcaacatcacacaaattagtgttgtctgttaatccctatgtttgcaatgccccgggttgtgatgtcactgatgtgacacaactgtatctaggaggtatgagctattattgcaagtcacataagcctcccattagttttccattatgtgctaatggtcaggtttttggtttatacaaaaacacatgtgtaggcagtgacaatgtcactgacttcaatgcgatagcaacatgtgattggactaatgctggcgattacatacttgccaacacttgtactgagagactcaagcttttcgcagcagaaacgctcaaagccactgaggaaacatttaagctgtcatatggtattgccactgtacgcgaagtactctctgacagagaattgcatctttcatgggaggttggaaaacctagaccaccattgaacagaaactatgtctttactggttaccgtgtaactaaaaataataaagtacagattggagagtacacctttgaaaaaggtgactatggtgatgctgttgtgtacagaggtactacgacatacaagttgaatgttggtgattactttgtgttgacatctcacactgtaatgccacttagtgcacctactctagtgccacaagagcactatgtgagaattactggcttgtacccaacactcaacatctcagatgagttttctagcaatgttgcaaattatcaaaaggtcggcatgcaaaagtactctacactccaaggaccacctggtactggtaagagtcattttgccatcggacttgctctctattacccatctgctcgcatagtgtatacggcatgctctcatgcagctgttgatgccctatgtgaaaaggcattaaaatatttgcccatagataaatgtagtagaatcatacctgcgcgtgcgcgcgtagagtgttttgataaattcaaagtgaattcaacactagaacagtatgttttctgcactgtaaatgcattgccagaaacaactgctgacattgtagtctttgatgaaatctctatggctactaattatgacttgagtgttgtcaatgctagacttcgtgcaaaacactacgtctatattggcgatcctgctcaattaccagccccccgcacattgctgactaaaggcacactagaaccagaatattttaattcagtgtgcagacttatgaaaacaataggtccagacatgttccttggaacttgtcgccgttgtcctgctgaaattgttgacactgtgagtgctttagtttatgacaataagctaaaagcacacaaggataagtcagctcaatgcttcaaaatgttctacaaaggtgttattacacatgatgtttcatctgcaatcaacagacctcaaataggcgttgtaagagaatttcttacacgcaatcctgcttggagaaaagctgtttttatctcaccttataattcacagaacgctgtagcttcaaaaatcttaggattgcctacgcagactgttgattcatcacagggttctgaatatgactatgtcatattcacacaaactactgaaacagcacactcttgtaatgtcaaccgcttcaatgtggctatcacaagggcaaaaattggcattttgtgcataatgtctgatagagatctttatgacaaactgcaatttacaagtctagaaataccacgtcgcaatgtggctacattacaagcagaaaatgtaactggactttttaaggactgtagtaagatcattactggtcttcatcctacacaggcacctacacacctcagcgttgatataaagttcaagactgaaggattatgtgttgacataccaggcataccaaaggacatgacctaccgtagactcatctctatgatgggtttcaaaatgaattaccaagtcaatggttaccctaatatgtttatcacccgcgaagaagctattcgtcacgttcgtgcgtggattggctttgatgtagagggctgtcatgcaactagagatgctgtgggcactgacctacctctccagctaggattttctacaggtgttaacttagtagctgtaccgactggttatgttgacactgaaaataacacagaattcaccagagttaatgcaaaacctccaccaggtgaccagtttaaacatcttataccactcatgtataaaggcttgccctggaatgtagtgcgtattaagatagtacaaatgctcagtgatacactgaaaggattgtcagacagagtcgtgttcgtcctttgggcgcatggctttgagcttacatcaatgaagtactttgtcaagattggacctgaaagaacgtgttgtctgtgtgacaaacgtgcaacttgcttttctacttcatcagatacttatgcctgctggaatcattctgtgggttttgactatgtctataacccatttatgattgatgttcagcagtggggctttacgggtaaccttcagagtaaccatgaccaacattgccaggtacatggaaatgcacatgtggctagttgtgatgctatcatgactagatgtttagcagtccatgagtgctttgttgagcgcgttgattggtctgttgaataccctattataggagatgaactgagggttaattctgcttgcagaaaagtacaacacatggttgtgaagtctgcattgcttgctgataagttcccagttcttcatgacattggaaatccaaaggctatcaagtgtgtgcctcaggctgaagtagaatggaagttctacgatgctcagccatgtagtgacaaagcttacaaaatagaggaactcttctattcttatgccacacatcacggtaaatttcactgatggtgtttgtttgttttggaattgtaacgttgatcgttacccagccaatgcaattgtgtgtaggtttgacacaagagtcttgtcaaacttgaacttaccaggctgtgatggtggtagtttgtatgtgaataagcatgcattccacactccagctttcgataaaagtgcatttactaatttaaagcaattgcctttcttttactattctgatagtccttgtgagtctcatggcaaacaagtagtgtcggatattgattatgttccactcaaatctgctacgtgtattacacgatgcaatttaggtggtgctgtttgcagacaccatgcaaatgagtaccgacagtacttggatgcatataatatgatgacttctgctggatttagcctatggatttacaaacaatttgatacttataacctgtggaatacatttaccaggttacagagtttagaaaatgtggcttataatgttgttaataaaggacactttgatggacacgccggcgaagcacctgtttccatcattaataatgctgtttacacaaaggtagatggtattgatgtggagatctttgaaaataagacaacacttcctattaatgttgcatttgagctttgggctaagcgtaacattaaaccagtgccagagattaagatactcaataatttgggtgttgatatcgctgctaatactgtaatctgggactacaaaagagaagccccagcacatgtatctacaataggtgtctgcacaatgactgacattgccaagaaacctactgagagtgcttgttcttcacttactgtcttgtttgatggtagagtggaaggacaggtagacctttttagaaacgcccgtaatggtgttttaataacagaaggtccagtcaaaggactaacaccttcaaaaggtccagcacaagctagcgtcaatggagtcacattaattggagaatcagtaaaaacacggtttaactactttaagaaagtagacggcattattcaacagttgcctgaaacctactttactcagagcagagacttagaggattttaagcccagatcacaaatggaaactgactttctcgagctcgctatggatgaattcatacagcgatataagctcgagggctatgccttcgaacacatcgtttatggagatttcagtcatggacaacttggcggtcttcatttaatgataggcttagccaagcgctcacaagattcaccacttaaattagaggattttatccctatggacagcacagtgaaaaattacttcataacagatgcgcaaacaggttcatcaaaatgtgtgtgttctgtgattgatcttttacttgatgactttgtcgagataataaagtcacaagatttgtcagtgatttcaaaagtggtcaaggttacaattgactatgctgaaatttcattcatgctttggtgtaaggatggacatgttgaaaccttctacccaaaactacaagcaagtcaagcgtggcaaccaggtgttgcgatgcctaacttgtacaagatgcaaagaatgcttcttgaaaagtgtgaccttcagcaattatggtgaaaatgctgttataccaaaaggaataatgatgaatgtcgcaaagtatactcaactgtgtcaatacttaaatacacttactttagccgtaccctacaacatgagagttattcactttggtgctggctctgataaaggagttgcaccaggtacagctgtgctcagacaatggttgccaactggcacactacttgtcgattcagatcttaatgacttcgtctccgacgcagattctactttaattggagactgtgcaacagtacatacggctaataaatgggaccttattattagcgatatgtatgaccctaggaccaaacatgtgacaaaagagaatgactctaaagaagggtttttcacttatctgtgtggatttataaagcaaaaactagccctgggtggttctatagctgtaaagataacagagcattcttggaatgctgacctttacaagcttatgggccatttctcatggtggacagcttttgttacaaatgtaaatgcatcatcatcggaagcatttttaattggggctaactatctcggcaagccgaaggaacaaattgatggctataccatgcatgctaactacattttctggaggaacacaaatcctatccagttgtcttcctattcactctttgacatgagcaaatttcctcttaaattaagaggaactgctgtaatgtctcttaaggagaatcaaatcaatgatatgatttattctcttctggaaaaaggtaggcttatcattagagaaaacaacagagttgtggtttcaagtgatattcttgttaacaactaaacgaacatgtttattttcttattatttcttactctcactagtggtagtgaccttgaccggtgcatcacttttgatgatgttcaagctcctaattacactcaacatacttcatctatgaggggggtttactatcctgatgaaatttttagatcagacactctttatttaactcaggatttatttcttccattttattctaatgttacagggtttcatactattaatcatacgtttggcaaccctgtcataccttttaaggatggtatttattttgctgccacagagaaatcaaatgttgtccgtggttgggtttttggttctaccatgaacaacaagtcacagtcggtgattattattaacaattctactaatgttgttatacgagcatgtaactttgaattgtgtgacaaccctttctttgctgtttctaaacccatgggtacacagacacatactatgatattcgataatgcatttaattgcactttcgagtacatatctgatgccttttcgcttgatgtttcagaaaagtcaggtaattttaaacacttacgagagtttgtgtttaaaaataaagatgggtttctctatgtttataagggctatcaacctatagatgtagttcgtgatctaccttctggttttaacactttgaaacctatttttaagttgcctcttggtattaacattacaaattttagagccattcttacagccttttcacctgctcaagacatttggggcacgtcagctgcagcctattttgttggctatttaaagccaactacatttatgctcaagtatgatgaaaatggtacaatcacagatgctgttgattgttctcaaaatccacttgctgaactcaaatgctctgttaagagctttgagattgacaaaggaatttaccagacctctaatttcagggttgttccctcaggagatgttgtgagattccctaatattacaaacttgtgtccttttggagaggtttttaatgctactaaattcccttctgtctatgcatgggagagaaaagaaatttctaattgtgttgctgattactctgtgctctacaactcaacatttttttcaacctttaagtgctatggcgtttctgccactaagttgaatgatctttgcttctccaatgtctatgcagattcttttgtagtcaagggagatgatgtaagacaaatagcgccaggacaaactggggttattgctgattataattataaattgcccagatgatttcatgggttgtgtccttgcttggaatactaggaacattgatgctacttcaactggtaattataattataaatataggtatcttagacatggcaagcttaggccctttgagagagacatatctaatgtgcctttctcccctgatggcaaaccttgcaccccacctgctcttaattgttattggccattaaatgattatggtttttacaccactactggcattggctaccaaccttacagagttgtagtactttcttttgaacttttaaatgcaccggccacggtttgtggaccaaaattatccactgaccttattaagaaccagtgtgtcaattttaattttaatggactcactggtactggtgtgttaactccttcttcaaagagatttcaaccatttcaacaatttggccgtgatgtttctgatttcactgattccgttcgagatcctaaaacatctgaaatattagacatttcaccttgctcttttgggggtgtaagtgtaattacacctggaacaaatgcttcatctgaagttgctgttctatatcaagatgttaactgcactgatgtttctacagcaattcatgcagatcaactcacaccagcttggcgcatatattctactggaaacaatgtattccagactcaagcaggctgtcttataggagctgagcatgtcgacacttcttatgagtgcgacattcctattggagctggcatttgtgctagttaccatacagtttctttattacgtagtactagccaaaaatctattgtggcttatactatgtctttaggtgctgttagttcaattgcttactctaataacaccattgctatacctactaacttttcaattagcattactacagaagtaatgcctgtttctatggctaaaacctccgtagattgtaatatgtacatctgcggagattctactgaatgtgctaatttgcttctccaatatggtagcttttgcacacaactaaatcgtgcactctcaggtattgctgctgaacaggatcgcaacacacgtgaagtgttcgctcaagtcaaacaaatgtacaaaaccccaactttgaaatattttggtggttttaatttttcacaaatattacctgaccctctaaagccaactaagaggtcttttattgaggacttgctctttaataaggtgacactcgctgatgctggcttcatgaagcaatatggcgaatgcctaggtgatattaatgctagagatctcatttgtgcgcagaagttcaatggacttacagtgttgccacctctgctcactgatgatatgattgctgcctacactgctgctctagttagtggtactgccactgctggatggacatttggtgctggcgctgctcttcaaataccttttgctaagcaaatggcatataggttcaatggcattggagttacccaaaatgttctctatgagaaccaaaaacaaatcgccaaccaatttaacaaggcgattagtcaaattcaagaatcacttacaacaacatcaactgcattgggcaagctgcaagacgttgttaaccagaatgctcaagcattaaacacacttgttaaacaacttagctctaattttggtgcaatttcaagtgtgctaaatgatatcctttcgcgacttgataaagccgaggcggaggtacaaattgacaggttaattacaggcagacttcaaagccttcaaacctatgtaacacaacaactaatcagggctgctgaaatcagggcttctgctaatcttgctactactaaaatgtctgagtgtgttcttggacaatcaaaaagagttgacttttgtggaaagggctaccaccttatgtccttcccacaagcagccccgcatggtgttgtcttcctacatgtcacgtatgtgccatcccaggagaggaacttcaccacagcgccagcaatttgtcatgaaggcaaagcatacttccctcgtgaaggtgtttttgtgtttaatggcactccttggtttattacacagaggaacttcttttctccacaaataattactacagacaatacatttgtctcaggaagttgtgatgtcgttattggcatcattaacaacacagtttatgatcctctacaacctgagcttgactcattcaaagaagagctggacaagtacttcaaaaatcatacatcaccggatgttgatcttggcgacatttcaggcattaacgcttctgtcgtcaacattcaaaaagaaattgaccgcctcaatgaggtcgctaaaaatttaaatgaatcactcattgaccttcaagaattgggaaaatatgagcaatatattaaatggccttggtatgtttggctcggcttcattgctggactaattgccatcgtcatggttacaatcttgctttgttgcatgactagttgttgcagttgcctcaagggtgcatgctcttgtggttcttgctgcaagtttgatgaggatgactctgagccagttctcaagggtgtcaaattacattacacataaacgaacttatggatttgtttgatgagattttttactcttagatcaattactgcacagccagtaaaaattgacaatgcttctcctgcaagtactgttcatgctacagcaacgataccgctacaagcctcactccctttcggatggcttgttattggcgttgcatttcttgctgtttttcagagcgctaccaaaataattgcgctcaataaaagatggcagctagccctttataagggcttccagttcatttgcaatttactgctgctatttgttaccatctattcacatcttttgcttgtcgctgcaggtatggaggcgcaatttttgtacctctatgccttgatatattttctacaatgcatcaacgcatgtagaattattatgagatgttggctttgttggaagtgcaaatccaagaacccattactttatgatgccaactactttgtttgctggcacacacataactatgactactgtataccatataacagtgtcacagatacaattgtcgttactgaaggtgacggcatttcaacaccaaaactcaaagaagactaccaaattggtggttattctgaggataggcactcaggtgttaaagactatgtcgttgtacatggctatttcaccgaagtttactaccagctggagtctacacaaattactacagacactggtattgaaaatgctacattcttcatctttaacaagcttgttaaggacccaccgaatgtgcaaatacacacaatcgacggctcttcaggagttgctaatccagcaatggatccaatttatgatgagccgacgacgactactagcgtgcctttgtaagcacaagaaagtgagtacgaacttatgtactcattcgtttcggaagaaacaggtacgttaatagttaatagcgtacttctttttcttgctttcgtggtattcttgctagtcacactagccatccttactgcgcttcgattgtgtgcgtactgctgcaatattgttaacgtgagtttagtaaaaccaacggtttacgtctactcgcgtgttaaaaatctgaactcttctgaaggagttcctgatcttctggtctaaacgaactaactattattattattctgtttggaactttaacattgcttatcatggcagacaacggtactattaccgttgaggagcttaaacaactcctggaacaatggaacctagtaataggtttcctattcctagcctggattatgttactacaatttgcctattctaatcggaacaggtttttgtacataataaagcttgttttcctctggctcttgtggccagtaacacttgcttgttttgtgcttgctgctgtctacagaattaattgggtgactggcgggattgcgattgcaatggcttgtattgtaggcttgatgtggcttagctacttcgttgcttccttcaggctgtttgctcgtacccgctcaatgtggtcattcaacccagaaacaaacattcttctcaatgtgcctctccgggggacaattgtgaccagaccgctcatggaaagtgaacttgtcattggtgctgtgatcattcgtggtcacttgcgaatggccggacactccctagggcgctgtgacattaaggacctgccaaaagagatcactgtggctacatcacgaacgctttcttattacaaattaggagcgtcgcagcgtgtaggcactgattcaggttttgctgcatacaaccgctaccgtattggaaactataaattaaatacagaccacgccggtagcaacgacaatattgctttgctagtacagtaagtgacaacagatgtttcatcttgttgacttccaggttacaatagcagagatattgattatcattatgaggactttcaggattgctatttggaatcttgacgttataataagttcaatagtgagacaattatttaagcctctaactaagaagaattattcggagttagatgatgaagaacctatggagttagattatccataaaacgaacatgaaaattattctcttcctgacattgattgtatttacatcttgcgagctatatcactatcaggagtgagttagaggtacgactgtactactaaaagaaccttgcccatcaggaacatacgagggcaattcaccatttcaccctcttgctgacaataaatttgcactaacttgcactagcacacactttgcttttgcttgtgctgacggtactcgacatacctatcagctgcgtgcaagatcagtttcaccaaaacttttcatcagacaagaggaggttcaacaagagctctactcgccactttttctcattgttgctgctctagtatttttaatactttgcttcaccattaagagaaagacagaatgaatgagctcactttaattgacttctatttgtgctttttagcctttctgctattccttgttttaataatgcttattatattttggttttcactcgaaatccaggatctagaagaaccttgtaccaaagtctaaacgaacatgaaacttctcattgttttgacttgtatttctctatgcagttgcatatgcactgtagtacagcgctgtgcatctaataaacctcatgtgcttgaagatccttgtaaggtacaacactaggggtaatacttatagcactgcttggctttgtgctctaggaaaggttttaccttttcatagatggcacactatggttcaaacatgcacacctaatgttactatcaactgtcaagatccagctggtggtgcgcttatagctaggtgttggtaccttcatgaaggtcaccaaactgctgcatttagagacgtacttgttgttttaaataaacgaacaaattaaaatgtctgataatggaccccaatcaaaccaacgtagtgccccccgcattacatttggtggacccacagattcaactgacaataaccagaatggaggacgcaatggggcaaggccaaaacagcgccgaccccaaggtttacccaataatactgcgtcttggttcacagctctcactcagcatggcaaggaggaacttagattccctcgaggccagggcgttccaatcaacaccaatagtggtccagatgaccaaattggctactaccgaagagctacccgacgagttcgtggtggtgacggcaaaatgaaagagctcagccccagatggtacttctattacctaggaactggcccagaagcttcacttccctacggcgctaacaaagaaggcatcgtatgggttgcaactgagggagccttgaatacacccaaagaccacattggcacccgcaatcctaataacaatgctgccaccgtgctacaacttcctcaaggaacaacattgccaaaaggcttctacgcagagggaagcagaggcggcagtcaagcctcttctcgctcctcatcacgtagtcgcggtaattcaagaattcactcctggcagcagtaggggaaattctcctgctcgaatggctagcggaggtggtgaaactgccctcgcgctattgctgctagacagattgaaccagcttgagagcaaagtttctggtaaaggccaacaacaacaaggccaaactgtcactaagaaatctgctgctgaggcatctaaaaagcctcgccaaaaacgtactgccacaaaacagtacaacgtcactcaagcatttgggagacgtggtccagaacaaacccaaggaaatttcggggaccaagacctaatcagacaaggaactgattacaaacattggccgcaaattgcacaatttgctccaagtgcctctgcattctttggaatgtcacgcattggcatggaagtcacaccttcgggaacatggctgacttatcatggagccattaaattggatgacaaagatccacaattcaaagacaacgtcatactgctgaacaagcacattgacgcatacaaaacattcccaccaacagagcctaaaaaggacaaaaagaaaaagactgatgaagctcagcctttgccgcagagacaaaagaagcagcccactgtgactcttcttcctgcggctgacatggatgatttctccagacaacttcaaaattccatgagtggagcttctgctgattcaactcaggcataaacactcatgatgaccacacaaggcagatgggctatgtaaacgttttcgcaattccgtttacgatacatagtctactcttgtgcagaatgaattctcgtaactaaacagcacaagtaggtttagttaactttaatctcacatagcaatctttaatcaatgtgtaacattagggaggacttgaaagagccaccacattttcatcgaggccacgcggagtacgatcgagggtacagtgaataatgctagggagagctgcctatatggaagagccctaatgtgtaaaattaattttagtagtgctatccccatgtgattttaatagcttcttaggagaatgacaa

SEQ ID NO: 29810 - DNA, 29738 bp, SARS Coronavirus
cctacccaggaaaagccaaccaacctcgatctcttgtagatctgttctctaaacgaactttaaaatctgtgtagctgtcgctcggctgcatgcctagtgcacctacgcagtataaacaataataaattttactgtcgttgacaagaaacgagtaactcgtccctcttctgcagactgcttacggtttcgtccgtgttgcagtcgatcatcagcatacctaggtttcgtccgggtgtgaccgaaaggtaagatggagagccttgttcttggtgtcaacgagaaaacacacgtccaactcagtttgcctgtccttcaggttagagacgtgctagtgcgtggcttcggggactctgtggaagaggccctatcggaggcacgtgaacacctcaaaaatggcacttgtggtctagtagagctggaaaaaggcgtactgccccagcttgaacagccctatgtgttcattaaacgttctgatgccttaagcaccaatcacggccacaaggtcgttgagctggttgcagaaatggacggcattcagtacggtcgtagcggtataacactgggagtactcgtgccacatgtgggcgaaaccccaattgcataccgcaatgttcttcttcgtaagaacggtaataagggagccggtggtcatagctatggcatcgatctaaagtcttatgacttaggtgacgagcttggcactgatcccattgaagattatgaacaaaactggaacactaagcatggcagtggtgcactccgtgaactcactcgtgagctcaatggaggtgcagtcactcgctatgtcgacaacaatttctgtggcccagatgggtaccctcttgattgcatcaaagattttctcgcacgcgcgggcaagtcaatgtgcactctttccgaacaacttgattacatcgagtcgaagagaggtgtctactgctgccgtgaccatgagcatgaaattgcctggttcactgagcgctctgataagagctacgagcaccagacacccttcgaaattaagagtgccaagaaatttgacactttcaaaggggaatgcccaaagtttgtgtttcctcttaactcaaaagtcaaagtcattcaaccacgtgttgaaaagaaaaagactgagggtttcatggggcgtatacgctctgtgtaccctgttgcatctccacaggagtgtaacaatatgcacttgtctaccttgatgaaatgtaatcattgcgatgaagtttcatggcagacgtgcgactttctgaaagccacttgtgaacattgtggcactgaaaatttagttattgaaggacctactacatgtgggtacctacctactaatgctgtagtgaaaatgccatgtcctgcctgtcaagacccagagattggacctgagcatagtgttgcagattatcacaaccactcaaacattgaaactcgactccgcaagggaggtaggactagatgttttggaggctgtgtgtttgcctatgttggctgctataataagcgtgcctactgggttcctcgtgctagtgctgatattggctcaggccatactggcattactggtgacaatgtggagaccttgaatgaggatctccttgagatactgagtcgtgaacgtgttaacattaacattgttggcgattttcatttgaatgaagaggttgccatcattttggcatctttctctgcttctacaagtgcctttattgacactataaagagtcttgattacaagtctttcaaaaccattgttgagtcctgcggtaactataaagttaccaagggaaagcccgtaaaaggtgcttggaacattggacaacagagatcagttttaacaccactgtgtggttttccctcacaggctgctggtgttatcagatcaatttttgcgcgcacacttgatgcagcaaaccactcaattcctgatttgcaaagagcagctgtcaccatacttgatggtatttctgaacagtcattacgtcttgtcgacgccatggtttatacttcagacctgctcaccaacagtgtcattattatggcatatgtaactggtggtcttgtacaacagacttctcagtggttgtctaatcttttgggcactactgttgaaaaactcaggcctatctttgaatggattgaggcgaaacttagtgcaggagttgaatttctcaaggatgcttgggagattctcaaatttctcattacaggtgtttttgacatcgtcaagggtcaaatacaggttgcttcagataacatcaaggattgtgtaaaatgcttcattgatgttgttaacaaggcactcgaaatgtgcattgatcaagtcactatcgctggcgcaaagttgcgatcactcaacttaggtgaagtcttcatcgctcaaagcaagggactttaccgtcagtgtatacgtggcaaggagcagctgcaactactcatgcctcttaaggcaccaaaagaagtaacctttcttgaaggtgattcacatgacacagtacttacctctgaggaggttgttctcaagaacggtgaactcgaagcactcgagacgcccgttgatagcttcacaaatggagctatcgttggcacaccagtctgtgtaaatggcctcatgctcttagagattaaggacaaagaacaatactgcgcattgtctcctggtttactggctacaaacaatgtctttcgcttaaaagggggtgcaccaattaaaggtgtaacctttggagaagatactgtttgggaagttcaaggttacaagaatgtgagaatcacatttgagcttgatgaacgtgttgacaaagtgcttaatgaaaagtgctctgtctacactgttgaatccggtaccgaagttactgagtttgcatgtgttgtagcagaggctgttgtgaagactttacaaccagtttctgatctccttaccaacatgggtattgatcttgatgagtggagtgtagctacattctacttatttgatgatgctggtgaagaaaacttttcatcacgtatgtattgttccttttaccctccagatgaggaagaagaggacgatgcagagtgtgaggaagaagaaattgatgaaacctgtgaacatgagtacggtacagaggatgattatcaaggtctccctctggaatttggtgcctcagctgaaacagttcgagttgaggaagaagaagaggaagactggctggatgatactactgagcaatcagagattgagccagaaccagaacctacacctgaagaaccagttaatcagtttactggttatttaaaacttactgacaatgttgccattaaatgtgttgacatcgttaaggaggcacaaagtgctaatcctatggtgattgtaaatgctgctaacatacacctgaaacatggtggtggtgtagcaggtgcactcaacaaggcaaccaatggtgccatgcaaaaggagagtgatgattacattaagctaaatggccctcttacagtaggagggtcttgtttgctttctggacataatcttgctaagaagtgtctgcatgttgttggacctaacctaaatgcaggtgaggacatccagcttcttaaggcagcatatgaaaatttcaattcacaggacatcttacttgcaccattgttgtcagcaggcatatttggtgctaaaccacttcagtctttacaagtgtgcgtgcagacggttcgtacacaggtttatattgcagtcaatgacaaagctctttatgagcaggttgtcatggattatcttgataacctgaagcctagagtggaagcacctaaacaagaggagccaccaaacacagaagattccaaaactgaggagaaatctgtcgtacagaagcctgtcgatgtgaagccaaaaattaaggcctgcattgatgaggttaccacaacactggaagaaactaagtttcttaccaataagttactcttgtttgctgatatcaatggtaagctttaccatgattctcagaacatgcttagaggtgaagatatgtctttccttgagaaggatgcaccttacatggtaggtgatgttatcactagtggtgatatcacttgtgttgtaataccctccaaaaaggctggtggcactactgagatgctctcaagagctttgaagaaagtgccagttgatgagtatataaccacgtaccctggacaaggatgtgctggttatacacttgaggaagctaagactgctcttaagaaatgcaaatctgcattttatgtactaccttcagaagcacctaatgctaaggaagagattctaggaactgtatcctggaatttgagagaaatgcttgctcatgctgaagagacaagaaaattaatgcctatatgcatggatgttagagccataatggcaaccatccaacgtaagtataaaggaattaaaattcaagagggcatcgttgactatggtgtccgattcttcttttatactagtaaagagcctgtagcttctattattacgaagctgaactctctaaatgagccgcttgtcacaatgccaattggttatgtgacacatggttttaatcttgaagaggctgcgcgctgtatgcgttctcttaaagctcctgccgtagtgtcagtatcatcaccagatgctgttactacatataatggatacctcacttcgtcatcaaagacatctgaggagcactttgtagaaacagtttctttggctggctcttacagagattggtcctattcaggacagcgtacagagttaggtgttgaatttcttaagcgtggtgacaaaattgtgtaccacactctggagagccccgtcgagtttcatcttgacggtgaggttctttcacttgacaaactaaagagtctcttatccctgcgggaggttaagactataaaagtgttcacaactgtggacaacactaatctccacacacagcttgtggatatgtctatgacatatggacagcagtttggtccaacatacttggatggtgctgatgttacaaaaattaaacctcatgtaaatcatgagggtaagactttctttgtactacctagtgatgacacactacgtagtgaagctttcgagtactaccatactcttgatgagagttttcttggtaggtacatgtctgctttaaaccacacaaagaaatggaaatttcctcaagttggtggtttaacttcaattaaatgggctgataacaattgttatttgtctagtgttttattagcacttcaacagcttgaagtcaaattcaatgcaccagcacttcaagaggcttattatagagcccgtgctggtgatgctgctaacttttgtgcactcatactcgcttacagtaataaaactgttggcgagcttggtgatgtcagagaaactatgacccatcttctacagcatgctaatttggaatctgcaaagcgagttcttaatgtggtgtgtaaacattgtggtcagaaaactactaccttaacgggtgtagaagctgtgatgtatatgggtactctatcttatgataatcttaagacaggtgtttccattccatgtgtgtgtggtcgtgatgctacacaatatctagtacaacaagagtcttcttttgttatgatgtctgcaccacctgctgagtataaattacagcaaggtacattcttatgtgcgaatgagtacactggtaactatcagtgtggtcattacactcatataactgctaaggagaccctctatcgtattgacggagctcaccttacaaagatgtcagagtacaaaggaccagtgactgatgttttctacaaggaaacatcttacactacaaccatcaagcctgtgtcgtataaactcgatggagttacttacacagagattgaaccaaaattggatgggtattataaaaaggataatgcttactatacagagcagcctatagaccttgtaccaactcaaccattaccaaatgcgagttttgataatttcaaactcacatgttctaacacaaaatttgctgatgatttaaatcaaatgacaggcttcacaaagccagcttcacgagagctatctgtcacattcttcccagacttgaatggcgatgtagtggctattgactatagacactattcagcgagtttcaagaaaggtgctaaattactgcataagccaattgtttggcacattaaccaggctacaaccaagacaacgttcaaaccaaacacttggtgtttacgttgtctttggagtacaaagccagtagatacttcaaattcatttgaagttctggcagtagaagacacacaaggaatggacaatcttgcttgtgaaagtcaacaacccacctctgaagaagtagtggaaaatcctaccatacagaaggaagtcatagagtgtgacgtgaaaactaccgaagttgtaggcaatgtcatacttaaaccatcagatgaaggtgttaaagtaacacaagagttaggtcatgaggatcttatggctgcttatgtggaaaacacaagcattaccattaagaaacctaatgagctttcactagccttaggtttaaaaacaattgccactcatggtattgctgcaattaatagtgttccttggagtaaaattttggcttatgtcaaaccattcttaggacaagcagcaattacaacatcaaattgcgctaagagattagcacaacgtgtgtttaacaattatatgccttatgtgtttacattattgttccaattgtgtacttttactaaaagtaccaattctagaattagagcttcactacctacaactattgctaaaaatagtgttaagagtgttgctaaattatgtttggatgccggcattaattatgtgaagtcacccaaattttctaaattgttcacaatcgctatgtggctattgttgttaagtatttgcttaggttctctaatctgtgtaactgctgcttttggtgtactcttatctaattttggtgctccttcttattgtaatggcgttagagaattgtatcttaattcgtctaacgttactactatggatttctgtgaaggttcttttccttgcagcatttgtttaagtggattagactcccttgattcttatccagctcttgaaaccattcaggtgacgatttcatcgtacaagctagacttgacaattttaggtctggccgctgagtgggttttggcatatatgttgttcacaaaattcttttatttattaggtctttcagctataatgcaggtgttctttggctattttgctagtcatttcatcagcaattcttggctcatgtggtttatcattagtattgtacaaatggcacccgtttctgcaatggttaggatgtacatcttctttgcttctttctactacatatggaagagctatgttcatatcatggatggttgcacctcttcgacttgcatgatgtgctataagcgcaatcgtgccacacgcgttgagtgtacaactattgttaatggcatgaagagatctttctatgtctatgcaaatggaggccgtggcttctgcaagactcacaattggaattgtctcaattgtgacacattttgcactggtagtacattcattagtgatgaagttgctcgtgatttgtcactccagtttaaaagaccaatcaaccctactgaccagtcatcgtatattgttgatagtgttgctgtgaaaaatggcgcgcttcacctctactttgacaaggctggtcaaaagacctatgagagacatccgctctcccattttgtcaatttagacaatttgagagctaacaacactaaaggttcactgcctattaatgtcatagtttttgatggcaagtccaaatgcgacgagtctgcttctaagtctgcttctgtgtactacagtcagctgatgtgccaacctattctgttgcttgaccaagctcttgtatcagacgttggagatagtactgaagtttccgttaagatgtttgatgcttatgtcgacaccttttcagcaacttttagtgttcctatggaaaaacttaaggcacttgttgctacagctcacagcgagttagcaaagggtgtagctttagatggtgtcctttctacattcgtgtcagctgcccgacaaggtgttgttgataccgatgttgacacaaaggatgttattgaatgtctcaaactttcacatcactctgacttagaagtgacaggtgacagttgtaacaatttcatgctcacctataataaggttgaaaacatgacgcccagagatcttggcgcatgtattgactgtaatgcaaggcatatcaatgcccaagtagcaaaaagtcacaatgtttcactcatctggaatgtaaaagactacatgtctttatctgaacagctgcgtaaacaaattcgtagtgctgccaagaagaacaacataccttttagactaacttgtgctacaactagacaggttgtcaatgtcataactactaaaatctcactcaagggtggtaagattgttagtacttgttttaaacttatgcttaaggccacattattgtgcgttcttgctgcattggtttgttatatcgttatgccagtacatacattgtcaatccatgatggttacacaaatgaaatcattggttacaaagccattcaggatggtgtcactcgtgacatcatttctactgatgattgttttgcaaataaacatgctggttttgacgcatggtttagccagcgtggtggttcatacaaaaatgacaaaagctgccctgtagtagctgctatcattacaagagagattggtttcatagtgcctggcttaccgggtactgtgctgagagcaatcaatggtgacttcttgcattttctacctcgtgtttttagtgctgttggcaacatttgctacacaccttccaaactcattgagtatagtgattttgctacctctgcttgcgttcttgctgctgagtgtacaatttttaaggatgctatgggcaaacctgtgccatattgttatgacactaatttgctagagggttctatttcttatagtgagcttcgtccagacactcgttatgtgcttatggatggttccatcatacagtttcctaacacttacctggagggttctgttagagtagtaacaacttttgatgctgagtactgtagacatggtacatgcgaaaggtcagaagtaggtatttgcctatctaccagtggtagatgggttcttaataatgagcattacagagctctatcaggagttttctgtggtgttgatgcgatgaatctcatagctaacatctttactcctcttgtgcaacctgtgggtgctttagatgtgtctgcttcagtagtggctggtggtattattgccatattggtgacttgtgctgcctactactttatgaaattcagacgtgtttttggtgagtacaaccatgttgttgctgctaatgcacttttgtttttgatgtctttcactatactctgtctggtaccagcttacagctttctgccgggagtctactcagtcttttacttgtacttgacattctatttcaccaatgatgtttcattcttggctcaccttcaatggtttgccatgttttctcctattgtgcctttttggataacagcaatctatgtattctgtatttctctgaagcactgccattggttctttaacaactatcttaggaaaagagtcatgtttaatggagttacatttagtaccttcgaggaggctgctttgtgtacctttttgctcaacaaggaaatgtacctaaaattgcgtagcgagacactgttgccacttacacagtataacaggtatcttgctctatataacaagtacaagtatttcagtggagccttagatactaccagctatcgtgaagcagcttgctgccacttagcaaaggctctaaatgactttagcaactcaggtgctgatgttctctaccaaccaccacagacatcaatcacttctgctgttctgcagagtggttttaggaaaatggcattcccgtcaggcaaagttgaagggtgcatggtacaagtaacctgtggaactacaactcttaatggattgtggttggatgacacagtatactgtccaagacatgtcatttgcacagcagaagacatgcttaatcctaactatgaagatctgctcattcgcaaatccaaccatagctttcttgttcaggctggcaatgttcaacttcgtgttattggccattctatgcaaaattgtctgcttaggcttaaagttgatacttctaaccctaagacacccaagtataaatttgtccgtatccaacctggtcaaacattttcagttctagcatgctacaatggttcaccatctggtgtttatcagtgtgccatgagacctaatcataccattaaaggttctttccttaatggatcatgtggtagtgttggttttaacattgattatgattgcgtgtctttctgctatatgcatcatatggagcttccaacaggagtacacgctggtactgacttagaaggtaaattctatggtccatttgttgacagacaaactgcacaggctgcaggtacagacacaaccataacattaaatgttttggcatggctgtatgctgctgttatcaatggtgataggtggtttcttaatagattcaccactactttgaatgactttaaccttgtggcaatgaagtacaactatgaacctttgacacaagatcatgttgacatattgggacctctttctgctcaaacaggaattgccgtcttagatatgtgtgctgctttgaaagagctgctgcagaatggtatgaatggtcgtactatccttggtagcactattttagaagatgagtttacaccatttgatgttgttagacaatgctctggtgttaccttccaaggtaagttcaagaaaattgttaagggcactcatcattggatgcttttaactttcttgacatcactattgattcttgttcaaagtacacagtggtcactgtttttctttgtttacgagaatgctttcttgccatttactcttggtattatggcaattgctgcatgtgctatgctgcttgttaagcataagcacgcattcttgtgcttgtttctgttaccttctcttgcaacagttgcttactttaatatggtctacatgcctgctagctgggtgatgcgtatcatgacatggcttgaattggctgacactagcttgtctggttataggcttaaggattgtgttatgtatgcttcagctttagttttgcttattctcatgacagctcgcactgtttatgatgatgctgctagacgtgtttggacactgatgaatgtcattacacttgtttacaaagtctactatggtaatgctttagatcaagctatttccatgtgggccttagttatttctgtaacctctaactattctggtgtcgttacgactatcatgtttttagctagagctatagtgtttgtgtgtgttgagtattacccattgttatttattactggcaacaccttacagtgtatcatgcttgtttattgtttcttaggctattgttgctgctgctactttggccttttctgtttactcaaccgttacttcaggcttactcttggtgtttatgactacttggtctctacacaagaatttaggtatatgaactcccaggggcttttgcctcctaagagtagtattgatgctttcaagcttaacattaagttgttgggtattggaggtaaaccatgtatcaaggttgctactgtacagtctaaaatgtctgacgtaaagtgcacatctgtggtactgctctcggttcttcaacaacttagagtagagtcatcttctaaattgtgggcacaatgtgtacaactccacaatgatattcttcttgcaaaagacacaactgaagctttcgagaagatggtttctcttttgtctgttttgctatccatgcagggtgctgtagacattaataggttgtgcgaggaaatgctcgataaccgtgctactcttcaggctattgcttcagaatttagttctttaccatcatatgccgcttatgccactgcccaggaggcctatgagcaggctgtagctaatggtgattctgaagtcgttctcaaaaagttaaagaaatctttgaatgtggctaaatctgagtttgaccgtgatgctgccatgcaacgcaagttggaaaagatggcagatcaggctatgacccaaatgtacaaacaggcaagatctgaggacaagagggcaaaagtaactagtgctatgcaaacaatgctcttcactatgcttaggaagcttgataatgatgcacttaacaacattatcaacaatgcgcgtgatggttgtgttccactcaacatcataccattgactacagcagccaaactcatggttgttgtccctgattatggtacctacaagaacacttgtgatggtaacacctttacatatgcatctgcactctgggaaatccagcaagttgttgatgcggatagcaagattgttcaacttagtgaaattaacatggacaattcaccaaatttggcttggcctcttattgttacagctctaagagccaactcagctgttaaactacagaataatgaactgagtccagtagcactacgacagatgtcctgtgcggctggtaccacacaaacagcttgtactgatgacaatgcacttgcctactataacaattcgaagggaggtaggtttgtgctggcattactatcagaccaccaagatctcaaatgggctagattccctaagagtgatggtacaggtacaatttacacagaactggaaccaccttgtaggtttgttacagacacaccaaaagggcctaaagtgaaatacttgtacttcatcaaaggcttaaacaacctaaatagaggtatggtgctgggcagtttagctgctacagtacgtcttcaggctggaaatgctacagaagtacctgccaattcaactgtgctttccttctgtgcttttgcagtagaccctgctaaagcatataaggattacctagcaagtggaggacaaccaatcaccaactgtgtgaagatgttgtgtacacacactggtacaggacaggcaattactgtaacaccagaagctaacatggaccaagagtcctttggtggtgcttcatgttgtctgtattgtagatgccacattgaccatccaaatcctaaaggattctgtgacttgaaaggtaagtacgtccaaatacctaccacttgtgctaatgacccagtgggttttacacttagaaacacagtctgtaccgtctgcggaatgtggaaaggttatggctgtagttgtgaccaactccgcgaacccttgatgcagtctgcggatgcatcaacgtttttaaacgggtttgcggtgtaagtgcagcccgtcttacaccgtgcggcacaggcactagtactgatgtcgtctacagggcttttgatatttacaacgaaaaagttgctggttttgcaaagttcctaaaaactaattgctgtcgcttccaggagaaggatgaggaaggcaatttattagactcttactttgtagttaagaggcatactatgtctaactaccaacatgaagagactatttataacttggttaaagattgtccagcggttgctgtccatgactttttcaagtttagagtagatggtgacatggtaccacatatatcacgtcagcgtctaactaaatacacaatggctgatttagtctatgctctacgtcattttgatgagggtaattgtgatacattaaaagaaatactcgtcacatacaattgctgtgatgatgattatttcaataagaaggattggtatgacttcgtagagaatcctgacatcttacgcgtatatgctaacttaggtgagcgtgtacgccaatcattattaaagactgtacaattctgcgatgctatgcgtgatgcaggcattgtaggcgtactgacattagataatcaggatcttaatgggaactggtacgatttcggtgatttcgtacaagtagcaccaggctgcggagttcctattgtggattcatattactcattgctgatgcccatcctcactttgactagggcattggctgctgagtcccatatggatgctgatctcgcaaaaccacttattaagtgggatttgctgaaatatgattttacggaagagagactttgtctcttcgaccgttattttaaatattgggaccagacataccatcccaattgtattaactgtttggatgataggtgtatccttcattgtgcaaactttaatgtgttattttctactgtgtttccacctacaagttttggaccactagtaagaaaaatatttgtagatggtgttccttttgttgtttcaactggataccattttcgtgagttaggagtcgtacataatcaggatgtaaacttacatagctcgcgtctcagtttcaaggaacttttagtgtatgctgctgatccagctatgcatgcagcttctggcaatttattgctagataaacgcactacatgcttttcagtagctgcactaacaaacaatgttgcttttcaaactgtcaaacccggtaattttaataaagacttttatgactttgctgtgtctaaaggtttctttaaggaaggaagttctgttgaactaaaacacttcttctttgctcaggatggcaacgctgctatcagtgattatgactattatcgttataatctgccaacaatgtgtgatatcagacaactcctattcgtagttgaagttgttgataaatactttgattgttacgatggtggctgtattaatgccaaccaagtaatcgttaacaatctggataaatcagctggtttcccatttaataaatggggtaaggctagactttattatgactcaatgagttatgaggatcaagatgcacttttcgcgtatactaagcgtaatgtcatccctactataactcaaatgaatcttaagtatgccattagtgcaaagaatagagctcgcaccgtagctggtgtctctatctgtagtactatgacaaatagacagtttcatcagaaattattgaagtcaatagccgccactagaggagctactgtggtaattggaacaagcaagttttacggtggctggcataatatgttaaaaactgtttacagtgatgtagaaactccacaccttatgggttgggattatccaaaatgtgacagagccatgcctaacatgcttaggataatggcctctcttgttcttgctcgcaaacataacacttgctgtaacttatcacaccgtttctacaggttagctaacgagtgtgcgcaagtattaagtgagatggtcatgtgtggcggctcactatatgttaaaccaggtggaacatcatccggtgatgctacaactgcttatgctaatagtgtctttaacatttgtcaagctgttacagccaatgtaaatgcacttctttcaactgatggtaataagatagctgacaagtatgtccgcaatctacaacacaggctctatgagtgtctctatagaaatagggatgttgatcatgaattcgtggatgagttttacgcttacctgcgtaaacatttctccatgatgattctttctgatgatgccgttgtgtgctataacagtaactatgcggctcaaggtttagtagctagcattaagaactttaaggcagttctttattatcaaaataatgtgttcatgtctgaggcaaaatgttggactgagactgaccttactaaaggacctcacgaattttgctcacagcatacaatgctagttaaacaaggagatgattacgtgtacctgccttacccagatccatcaagaatattaggcgcaggctgttttgtcgatgatattgtcaaaacagatggtacacttatgattgaaaggttcgtgtcactggctattgatgcttacccacttacaaaacatcctaatcaggagtatgctgatgtctttcacttgtatttacaatacattagaaagttacatgatgagcttactggccacatgttggacatgtattccgtaatgctaactaatgataacacctcacggtactgggaacctgagttttatgaggctatgtacacaccacatacagtcttgcaggctgtaggtgcttgtgtattgtgcaattcacagacttcacttcgttgcggtgcctgtattaggagaccattcctatgttgcaagtgctgctatgaccatgtcatttcaacatcacacaaattagtgttgtctgttaatccctatgtttgcaatgccccaggttgtgatgtcactgatgtgacacaactgtatctaggaggtatgagctattattgcaagtcacataagcctcccattagttttccattatgtgctaatggtcaggtttttggtttatacaaaaacacatgtgtaggcagtgacaatgtcactgacttcaatgcgatagcaacatgtgattggactaatgctggcgattacatacttgccaacacttgtactgagagactcaagcttttcgcagcagaaacgctcaaagccactgaggaaacatttaagctgtcatatggtattgccactgtacgcgaagtactctctgacagagaattgcatctttcatgggaggttggaaaacctagaccaccattgaacagaaactatgtctttactggttaccgtgtaactaaaaatagtaaagtacagattggagagtacacctttgaaaaaggtgactatggtgatgctgttgtgtacagaggtactacgacatacaagttgaatgttggtgattactttgtgttgacatctcacactgtaatgccacttagtgcacctactctagtgccacaagagcactatgtgagaattactggcttgtacccaacactcaacatctcagatgagttttctagcaatgttgcaaattatcaaaaggtcggcatgcaaaagtactctacactccaaggaccacctggtactggtaagagtcattttgccatcggacttgctctctattacccatctgctcgcatagtgtatacggcatgctctcatgcagctgttgatgccctatgtgaaaaggcattaaaatatttgcccatagataaatgtagtagaatcatacctgcgcgtgcgcgcgtagagtgttttgataaattcaaagtgaattcaacactagaacagtatgttttctgcactgtaaatgcattgccagaaacaactgctgacattgtagtctttgatgaaatctctatggctactaattatgacttgagtgttgtcaatgctagacttcgtgcaaaacactacgtctatattggcgatcctgctcaattaccagccccccgcacattgctgactaaaggcacactagaaccagaatattttaattcagtgtgcagacttatgaaaacaataggtccagacatgttccttggaacttgtcgccgttgtcctgctgaaattgttgacactgtgagtgctttagtttatgacaataagctaaaagcacacaaggataagtcagctcaatgcttcaaaatgttctacaaaggtgttattacacatgatgtttcatctgcaatcaacagacctcaaataggcgttgtaagagaatttcttacacgcaatcctgcttggagaaaagctgtttttatctcaccttataattcacagaacgctgtagcttcaaaaatcttaggattgcctacgcagactgttgattcatcacagggttctgaatatgactatgtcatattcacacaaactactgaaacagcacactcttgtaatgtcaaccgcttcaatgtggctatcacaagggcaaaaattggcattttgtgcataatgtctgatagagatctttatgacaaactgcaatttacaagtctagaaataccacgtcgcaatgtggctacattacaagcagaaaatgtaactggactttttaaggactgtagtaagatcattactggtcttcatcctacacaggcacctacacacctcagcgttgatataaagttcaagactgaaggattatgtgttgacataccaggcataccaaaggacatgacctaccgtagactcatctctatgatgggtttcaaaatgaattaccaagtcaatggttaccctaatatgtttatcacccgcgaagaagctattcgtcacgttcgtgcgtggattggctttgatgtagagggctgtcatgcaactagagatgctgtgggtactaacctacctctccagctaggattttctacaggtgttaacttagtagctgtaccgactggttatgttgacactgaaaataacacagaattcaccagagttaatgcaaaacctccaccaggtgaccagtttaaacatcttataccactcatgtataaaggcttgccctggaatgtagtgcgtattaagatagtacaaatgctcagtgatacactgaaaggattgtcagacagagtcgtgttcgtcctttgggcgcatggctttgagcttacatcaatgaagtactttgtcaagattggacctgaaagaacgtgttgtctgtgtgacaaacgtgcaacttgcttttctacttcatcagatacttatgcctgctggaatcattctgtgggttttgactatgtctataacccatttatgattgatgttcagcagtggggctttacgggtaaccttcagagtaaccatgaccaacattgccaggtacatggaaatgcacatgtggctagttgtgatgctatcatgactagatgtttagcagtccatgagtgctttgttaagcgcgttgattggtctgttgaataccctattataggagatgaactgagggttaattctgcttgcagaaaagtacaacacatggttgtgaagtctgcattgcttgctgataagtttccagttcttcatgacattggaaatccaaaggctatcaagtgtgtgcctcaggctgaagtagaatggaagttctacgatgctcagccatgtagtgacaaagcttacaaaatagaggaactcttctattcttatgctacacatcacgataaattcactgatggtgtttgtttgttttggaattgtaacgttgatcgttacccagccaatgcaattgtgtgtaggtttgacacaagagtcttgtcaaacttgaacttaccaggctgtgatggtggtagtttgtatgtgaataagcatgcattccacactccagctttcgataaaagtgcatttactaatttaaagcaattgcctttcttttactattctgatagtccttgtgagtctcatggcaaacaagtagtgtcggatattgattatgttccactcaaatctgctacgtgtattacacgatgcaatttaggtggtgctgtttgcagacaccatgcaaatgagtaccgacagtacttggatgcatataatatgatgatttctgctggatttagcctatggatttacaaacaatttgatacttataacctgtggaatacatttaccaggttacagagtttagaaaatgtggcttataatgttgttaataaaggacactttgatggacacgccggcgaagcacctgtttccatcattaataatgctgtttacacaaaggtagatggtattgatgtggagatctttgaaaataagacaacacttcctgttaatgttgcatttgagctttgggctaagcgtaacattaaaccagtgccagagattaagatactcaataatttgggtgttgatatcgctgctaatactgtaatctgggactacaaaagagaagccccagcacatgtatctacaataggtgtctgcacaatgactgacattgccaagaaacctactgagagtgcttgttcttcacttactgtcttgtttgatggtagagtggaaggacaggtagacctttttagaaacgcccgtaatggtgttttaataacagaaggttcagtcaaaggtctaacaccttcaaagggaccagcacaagctagcgtcaatggagtcacattaattggagaatcagtaaaaacacagtttaactactttaagaaagtagacggcattattcaacagttgcctgaaacctactttactcagagcagagacttagaggattttaagcccagatcacaaatggaaactgactttctcgagctcgctatggatgaattcatacagcgatataagctcgagggctatgccttcgaacacatcgtttatggagatttcagtcatggacaacttggcggtcttcatttaatgataggcttagccaagcgctcacaagattcaccacttaaattagaggattttatccctatggacagcacagtgaaaaattacttcataacagatgcgcaaacaggttcatcaaaatgtgtgtgttctgtgattgatcttttacttgatgactttgtcgagataataaagtcacaagatttgtcagtgatttcaaaagtggtcaaggttacaattgactatgctgaaatttcattcatgctttggtgtaaggatggacatgttgaaaccttctacccaaaactacaagcaagtcaagcgtggcaaccaggtgttgcgatgcctaacttgtacaagatgcaaagaatgcttcttgaaaagtgtgaccttcagaattatggtgaaaatgctgttataccaaaaggaataatgatgaatgtcgcaaagtatactcaactgtgtcaatacttaaatacacttactttagctgtaccctacaacatgagagttattcactttggtgctggctctgataaaggagttgcaccaggtacagctgtgctcagacaatggttgccaactggcacactacttgtcgattcagatcttaatgacttcgtctccgacgcagattctactttaattggagactgtgcaacagtacatacggctaataaatgggaccttattattagcgatatgtatgaccctaggaccaaacatgtgacaaaagagaatgactctaaagaagggtttttcacttatctgtgtggatttataaagcaaaaactagccctgggtggttctatagctgtaaagataacagagcattcttggaatgctgacctttacaagcttatgggccatttctcatggtggacagcttttgttacaaatgtaaatgcatcatcatcggaagcatttttaattggggctaactatcttggcaagccgaaggaacaaattgatggctataccatgcatgctaactacattttctggaggaacacaaatcctatccagttgtcttcctattcactctttgacatgagcaaatttcctcttaaattaagaggaactgctgtaatgtctcttaaggagaatcaaatcaatgatatgatttattctcttctggaaaaaggtaggcttatcattagagaaaacaacagagttgtggtttcaagtgatattcttgttaacaactaaacgaacatgtttattttcttattatttcttactctcactagtggtagtgaccttgaccggtgcaccacttttgatgatgttcaagctcctaattacactcaacatacttcatctatgaggggggtttactatcctgatgaaatttttagatcagacactctttatttaactcaggatttatttcttccattttattctaatgttacagggtttcatactattaatcatacgtttggcaaccctgtcataccttttaaggatggtatttattttgctgccacagagaaatcaaatgttgtccgtggttgggtttttggttctaccatgaacaacaagtcacagtcggtgattattattaacaattctactaatgttgttatacgagcatgtaactttgaattgtgtgacaaccctttctttgctgtttctaaacccatgggtacacagacacatactatgatattcgataatgcatttaattgcactttcgagtacatatctgatgccttttcgcttgatgtttcagaaaagtcaggtaattttaaacacttacgagagtttgtgtttaaaaataaagatgggtttctctatgtttataagggctatcaacctatagatgtagttcgtgatctaccttctggttttaacactttgaaacctatttttaagttgcctcttggtattaacattacaaattttagagccattcttacagccttttcacctgctcaagacatttggggcacgtcagctgcagcctattttgttggctatttaaagccaactacatttatgctcaagtatgatgaaaatggtacaatcacagatgctgttgattgttctcaaaatccacttgctgaactcaaatgctctgttaagagctttgagattgacaaaggaatttaccagacctctaatttcagggttgttccctcaggagatgttgtgagattccctaatattacaaacttgtgtccttttggagaggtttttaatgctactaaattcccttctgtctatgcatgggagagaaaaaaaatttctaattgtgttgctgattactctgtgctctacaactcaacatttttttcaacctttaagtgctatggcgtttctgccactaagttgaatgatctttgcttctccaatgtctatgcagattcttttgtagtcaagggagatgatgtaagacaaatagcgccaggacaaactggtgttattgctgattataattataaattgccagatgatttcatgggttgtgtccttgcttggaatactaggaacattgatgctacttcaactggtaattataattataaatataggtatcttagacatggcaagcttaggccctttgagagagacatatctaatgtgcctttctcccctgatggcaaaccttgcaccccacctgctcttaattgttattggccattaaatgattatggtttttacaccactactggcattggctaccaaccttacagagttgtagtactttcttttgaacttttaaatgcaccggccacggtttgtggaccaaaattatccactgaccttattaagaaccagtgtgtcaattttaattttaatggactcactggtactggtgtgttaactccttcttcaaagagatttcaaccatttcaacaatttggccgtgatgtttctgatttcactgattccgttcgagatcctaaaacatctgaaatattagacatttcaccttgctcttttgggggtgtaagtgtaattacacctggaacaaatgcttcatctgaagttgctgttctatatcaagatgttaactgcactgatgtttctacagcaattcatgcagatcaactcacaccagcttggcgcatatattctactggaaacaatgtattccagactcaagcaggctgtcttataggagctgagcatgtcgacacttcttatgagtgcgacattcctattggagctggcatttgtgctagttaccatacagtttctttattacgtagtactagccaaaaatctattgtggcttatactatgtctttaggtgctgatagttcaattgcttactctaataacaccattgctatacctactaacttttcaattagcattactacagaagtaatgcctgtttctatggctaaaacctccgtagattgtaatatgtacatctgcggagattctactgaatgtgctaatttgcttctccaatatggtagcttttgcacacaactaaatcgtgcactctcaggtattgctgctgaacaggatcgcaacacacgtgaagtgttcgctcaagtcaaacaaatgtacaaaaccccaactttgaaatattttggtggttttaatttttcacaaatattacctgaccctctaaagccaactaagaggtcttttattgaggacttgctctttaataaggtgacactcgctgatgctggcttcatgaagcaatatggcgaatgcctaggtgatattaatgctagagatctcatttgtgcgcagaagttcaatggacttacagtgttgccacctctgctcactgatgatatgattgctgcctacactgctgctctagttagtggtactgccactgctggatggacatttggtgctggcgctgctcttcaaataccttttgctatgcaaatggcatataggttcaatggcattggagttacccaaaatgttctctatgagaaccaaaaacaaatcgccaaccaatttaacaaggcgattagtcaaattcaagaatcacttacaacaacatcaactgcattgggcaagctgcaagacgttgttaaccagaatgctcaagcattaaacacacttgttaaacaacttagctctaattttggtgcaatttcaagtgtgctaaatgatatcctttcgcgacttgataaagtcgaggcggaggtacaaattgacaggttaattacaggcagacttcaaagccttcaaacctatgtaacacaacaactaatcagggctgctgaaatcagggcttctgctaatcttgctgctactaaaatgtctgagtgtgttcttggacaatcaaaaagagttgacttttgtggaaagggctaccaccttatgtccttcccacaagcagccccgcatggtgttgtcttcctacatgtcacgtatgtgccatcccaggagaggaacttcaccacagcgccagcaatttgtcatgaaggcaaagcatacttccctcgtgaaggtgtttttgtgtttaatggcacttcttggtttattacacagaggaacttcttttctccacaaataattactacagacaatacatttgtctcaggaaattgtgatgtcgttattggcatcattaacaacacagtttatgatcctctgcaacctgagcttgactcattcaaagaagagctggacaagtacttcaaaaatcatacatcaccagatgttgatcttggcgacatttcaggcattaacgcttctgtcgtcaacattcaaaaagaaattgaccgcctcaatgaggtcgctaaaaatttaaatgaatcactcattgaccttcaagaattgggaaaatatgagcaatatattaaatggccttggtatgtttggctcggcttcattgctggactaattgccatcgtcatggttacaatcttgctttgttgcatgactagttgttgcagttgcctcaagggtgcatgctcttgtggttcttgctgcaagtttgatgaggatgactctgagccagttctcaagggtgtcaaattacattacacataaacgaacttatggatttgtttatgagattttttactcttggatcaattactgcacagccagtaaaaattgacaatgcttctcctgcaagtactgttcatgctacagcaacgataccgctacaagcctcactccctttcggatggcttgttattggcgttgcatttcttgctgtttttcagagcgctaccaaaataattgcgctcaataaaagatggcagctagccctttataagggcttccagttcatttgcaatttactgctgctatttgttaccatctattcacatcttttgcttgtcgctgcaggtatggaggcgcaatttttgtacctctatgccttgatatattttctacaatgcatcaacgcatgtagaattattatgagatgttggctttgttggaagtgcaaatccaagaacccattactttatgatgccaactactttgtttgctggcacacacataactatgactactgtataccatataacagtgtcacagatacaattgtcgttactgaaggtgacggcatttcaacaccaaaactcaaagaagactaccaaattggtggttattctgaggataggcactcaggtgttaaagactatgtcgttgtacatggctatttcaccgaagtttactaccagcttgagtctacacaaattactacagacactggtattgaaaatgctacattcttcatctttaacaagcttgttaaagacccaccgaatgtgcaaatacacacaatcgacggctcttcaggagttgctaatccagcaatggatccaatttatgatgagccgacgacgactactagcgtgcctttgtaagcacaagaaagtgagtacgaacttatgtactcattcttttcggaagaaacaggtacgttaatagttaatagcgtacttctttttcttgctttcgtggtattcttgctagtcacactagccatccttactgcgcttcgattgtgtgcgtactgctgcaatattgttaacgtgagtttagtaaaaccaacggtttacgtctactcgcgtgttaaaaatctgaactcttctgaaggagttcctgatcttctggtctaaacgaactaactattattattattctgtttggaactttaacattgcttatcatggcagacaacggtactattaccgttgaggagcttaaacaactcctggaacaatggaacctagtaataggtttcctatgcctagcctggattatgttactacaatttgcctattctaatcggaacaggtttttgtacataataaagcttgttttcctctggctcttgtggccagtaacacttgcttgttttgtgcttgctgctgtctacagaattaattgggtgactggcgggattgcgattgcaatggcttgtattgtaggcttgatgtggcttagctacttcgttgcttccttcaggctgtttgctcgtacccgctcaatgtggtcattcaacccagaaacaaacattcttctcaatgtgcctctccgggggacaattgtgaccagaccgctcatggaaagtgaacttgtcattggtgctgtgatcattcgtggtcacttgcgaatggccggacactccctagggcgctgtgacattaaggacctgccaaaagagatcactgtggctacatcacgaacgctttcttattacaaattaggagcgtcgcagcgtgtaggcactgattcaggttttgctgcatacaaccgctaccgtattggaaactataaattaaatacagaccacgccggtagcaacgacaatattgctttgctagtacagtaagtgacaacagatgtttcatcttgttgacttccaggttacaatagcagagatattgattatcattatgaggactttcaggattgctatttggaatcttgacgttataataagttcaatagtgagacaattatttaagcctctaactaagaagaattattcggagttagatgatgaagaacctatggagttagattatccataaaacgaacatgaaaattattctcttcctgacattgattgtatttacatcttgcgagctatatcactatcaggagtgtgttagaggtacgactgtactactaaaagaaccttgcccatcaggaacatacgagggcaattcaccatttcaccctcttgctgacaataaatttgcactaacttgcactagcacacactttgcttttgcttgtgctgacggtactcgacatacctatcagctgcgtgcaagatcagtttcaccaaaacttttcatcagacaagaggaggttcaacaagagctctactcgccactttttctcattgttgctgctctagtatttttaatactttgcttcaccattaagagaaagacagaatgaatgagctcactttaattgacttctatttgtgctttttagcctttctgctattccttgttttaataatgcttattatattttggttttcactcgaaatccaggatctagaagaaccttgtaccaaagtctaaacgaacatgaaacttctcattgttttgacttgtatttctctatgcagttgcatatgcactgtagtacagcgctgtgcatctaataaacctcatgtgcttgaagatccttgaggtacaacactaggggtaatacttatagcactgcttggctttgtgctctaggaaaggttttaccttttcatagatggcacactatggttcaaacatgcacacctaatgttactatcaactgtcaagatccagctggtggtgcgcttatagctaggtgttggtaccttcatgaaggtcaccaaactgctgcatttagagacgtacttgttgttttaaataaacgaacaaattaaaatgtctgataatggaccccaatcaaaccaacgtagtgccccccgcattacatttggtggacccacagattcaactgacaataaccagaatggaggacgcaatggggcaaggccaaaacagcgccgaccccaaggtttacccaataatactgcgtcttggttcacagctctcactcagcatggcaaggaggaacttagattccctcgaggccagggcgttccaatcaacaccaatagtggtccagatgaccaaattggctactaccgaagagctacccgacgagttcgtggtggtgacggcaaaatgaaagagctcagccccagatggtacttctattacctaggaactggcccagaagcttcacttccctacggcgctaacaaagaaggcatcgtatgggttgcaactgagggagccttgaatacacccaaagaccacattggcacccgcaatcctaataacaatgctgccaccgtgctacaacttcctcaaggaacaacattgccaaaaggcttctacgcagagggaagcagaggcggcagtcaagcctcttctcgctcctcatcacgtagtcgcggtaattcaagaaattcaactcctggcagcagtaggggaaattctcctgctcgaatggctagcggaggtggtgaaactgccctcgcgctattgctgctagacagattgaaccagcttgagagcaaagtttctggtaaaggccaacaacaacaaggccaaactgtcactaagaaatctgctgctgaggcatctaaaaagcctcgccaaaaacgtactgccacaaaacagtacaacgtcactcaagcatttgggagacgtggtccagaacaaacccaaggaaatttcggggaccaagacctaatcagacaaggaactgattacaaacattggccgcaaattgcacaatttgctccaagtgcctctgcattctttggaatgtcacgcattggcatggaagtcacaccttcgggaacatggctgacttatcatggagccattaaattggatgacaaagatccacaattcaaagacaacgtcatactgctgaacaagcacattgacgcatacaaaacattcccaccaacagagcctaaaaaggacaaaaagaaaaagactgatgaagctcagcctttgccgcagagacaaaagaagcagcccactgtgactcttcttcctgcggctgacatggatgatttctccagacaacttcaaaattccatgagtggagcttctgctgattcaactcaggcataaacactcatgatgaccacacaaggcagatgggctatgtaaacgttttcgcaattccgtttacgatacatagtctactcttgtgcagaatgaattctcgtaactaaacagcacaagtaggtttagttaactttaatctcacatagcaatctttaatcaatgtgtaacattagggaggacttgaaagagccaccacattttcatcgaggccacgcggagtacgatcgagggtacagtgaataatgctagggagagctgcctatatggaagagccctaatgtgtaaaattaattttagtagtgctatccccatgtgattttaatagcttcttaggagaatgacaaaaaaaaaaaaaaaaaaaaaaaaaaa

SEQ ID NO: 29811 - DNA, 29745 bp, SARS Coronavirus
cctacccaggaaaagccaaccaacctcgatctcttgtagatctgttctctaaacgaactttaaaatctgtgtagctgtcgctcggctgcatgcctagtgcacctacgcagtataaacaataataaattttactgtcgttgacaagaaacgagtaactcgtccctcttctgcagactgcttacggtttcgtccgtgttgcagtcgatcatcagcatacctaggtttcgtccgggtgtgaccgaaaggtaagatggagagccttgttcttggtgtcaacgagaaaacacacgtccaactcagtttgcctgtccttcaggttagagacgtgctagtgcgtggcttcggggactctgtggaagaggccctatcggaggcacgtgaacacctcaaaaatggcacttgtggtctagtagagctggaaaaaggcgtactgccccagcttgaacagccctatgtgttcattaaacgttctgatgccttaagcaccaatcacggccacaaggtcgttgagctggttgcagaaatggacggcattcagtacggtcgtagcggtataacactgggagtactcgtgccacatgtgggcgaaaccccaattgcataccgcaatgttcttcttcgtaagaacggtaataagggagccggtggtcatagctatggcatcgatctaaagtcttatgacttaggtgacgagcttggcactgatcccattgaagattatgaacaaaactggaacactaagcatggcagtggtgcactccgtgaactcactcgtgagctcaatggaggtgcagtcactcgctatgtcgacaacaatttctgtggcccagatgggtaccctcttgattgcatcaaagattttctcgcacgcgcgggcaagtcaatgtgcactctttccgaacaacttgattacatcgagtcgaagagaggtgtctactgctgccgtgaccatgagcatgaaattgcctggttcactgagcgctctgataagagctacgagcaccagacacccttcgaaattaagagtgccaagaaatttgacactttcaaaggggaatgcccaaagtttgtgtttcctcttaactcaaaagtcaaagtcattcaaccacgtgttgaaaagaaaaagactgagggtttcatggggcgtatacgctctgtgtaccctgttgcatctccacaggagtgtaacaatatgcacttgtctaccttgatgaaatgtaatcattgcgatgaagtttcatggcagacgtgcgactttctgaaagccacttgtgaacattgtggcactgaaaatttagttattgaaggacctactacatgtgggtacctacctactaatgctgtagtgaaaatgccatgtcctgcctgtcaagacccagagattggacctgagcatagtgttgcagattatcacaaccactcaaacattgaaactcgactccgcaagggaggtaggactagatgttttggaggctgtgtgtttgcctatgttggctgctataataagcgtgcctactgggttcctcgtgctagtgctgatattggctcaggccatactggcattactggtgacaatgtggagaccttgaatgaggatctccttgagatactgagtcgtgaacgtgttaacattaacattgttggcgattttcatttgaatgaagaggttgccatcattttggcatctttctctgcttctacaagtgcctttattgacactataaagagtcttgattacaagtctttcaaaaccattgttgagtcctgcggtaactataaagttaccaagggaaagcccgtaaaaggtgcttggaacattggacaacagagatcagttttaacaccactgtgtggttttccctcacaggctgctggtgttatcagatcaatttttgcgcgcacacttgatgcagcaaaccactcaattcctgatttgcaaagagcagctgtcaccatacttgatggtatttctgaacagtcattacgtcttgtcgacgccatggtttatacttcagacctgctcaccaacagtgtcattattatggcatatgtaactggtggtcttgtacaacagacttctcagtggttgtctaatcttttgggcactactgttgaaaaactcaggcctatctttgaatggattgaggcgaaacttagtgcaggagttgaatttctcaaggatgcttgggagattctcaaatttctcattacaggtgtttttgacatcgtcaagggtcaaatacaggttgcttcagataacatcaaggattgtgtaaaatgcttcattgatgttgttaacaaggcactcgaaatgtgcattgatcaagtcactatcgctggcgcaaagttgcgatcactcaacttaggtgaagtcttcatcgctcaaagcaagggactttaccgtcagtgtatacgtggcaaggagcagctgcaactactcatgcctcttaaggcaccaaaagaagtaacctttcttgaaggtgattcacatgacacagtacttacctctgaggaggttgttctcaagaacggtgaactcgaagcactcgagacgcccgttgatagcttcacaaatggagctatcgttggcacaccagtctgtgtaaatggcctcatgctcttagagattaaggacaaagaacaatactgcgcattgtctcctggtttactggctacaaacaatgtctttcgcttaaaagggggtgcaccaattaaaggtgtaacctttggagaagatactgtttgggaagttcaaggttacaagaatgtgagaatcacatttgagcttgatgaacgtgttgacaaagtgcttaatgaaaagtgctctgtctacactgttgaatccggtaccgaagttactgagtttgcatgtgttgtagcagaggctgttgtgaagactttacaaccagtttctgatctccttaccaacatgggtattgatcttgatgagtggagtgtagctacattctacttatttgatgatgctggtgaagaaaacttttcatcacgtatgtattgttccttttaccctccagatgaggaagaagaggacgatgcagagtgtgaggaagaagaaattgatgaaacctgtgaacatgagtacggtacagaggatgattatcaaggtctccctctggaatttggtgcctcagctgaaacagttcgagttgaggaagaagaagaggaagactggctggatgatactactgagcaatcagagattgagccagaaccagaacctacacctgaagaaccagttaatcagtttactggttatttaaaacttactgacaatgttgccattaaatgtgttgacatcgttaaggaggcacaaagtgctaatcctatggtgattgtaaatgctgctaacatacacctgaaacatggtggtggtgtagcaggtgcactcaacaaggcaaccaatggtgccatgcaaaaggagagtgatgattacattaagctaaatggccctcttacagtaggagggtcttgtttgctttctggacataatcttgctaagaagtgtctgcatgttgttggacctaacctaaatgcaggtgaggacatccagcttcttaaggcagcatatgaaaatttcaattcacaggacatcttacttgcaccattgttgtcagcaggcatatttggtgctaaaccacttcagtctttacaagtgtgcgtgcagacggttcgtacacaggtttatattgcagtcaatgacaaagctctttatgagcaggttgtcatggattatcttgataacctgaagcctagagtggaagcacctaaacaagaggagccaccaaacacagaagattccaaaactgaggagaaatctgtcgtacagaagcctgtcgatgtgaagccaaaaattaaggcctgcattgatgaggttaccacaacactggaagaaactaagtttcttaccaataagttactcttgtttgctgatatcaatggtaagctttaccatgattctcagaacatgcttagaggtgaagatatgtctttccttgagaaggatgcaccttacatggtaggtgatgttatcactagtggtgatatcacttgtgttgtaataccctccaaaaaggctggtggcactactgagatgctctcaagagctttgaagaaagtgccagttgatgagtatataaccacgtaccctggacaaggatgtgctggttatacacttgaggaagctaagactgctcttaagaaatgcaaatctgcattttatgtactaccttcagaagcacctaatgctaaggaagagattctaggaactgtatcctggaatttgagagaaatgcttgctcatgctgaagagacaagaaaattaatgcctatatgcatggatgttagagccataatggcaaccatccaacgtaagtataaaggaattaaaattcaagagggcatcgttgactatggtgtccgattcttcttttatactagtaaagagcctgtagcttctattattacgaagctgaactctctaaatgagccgcttgtcacaatgccaattggttatgtgacacatggttttaatcttgaagaggctgcgcgctgtatgcgttctcttaaagctcctgccgtagtgtcagtatcatcaccagatgctgttactacatataatggatacctcacttcgtcatcaaagacatctgaggagcactttgtagaaacagtttctttggctggctcttacagagattggtcctattcaggacagcgtacagagttaggtgttgaatttcttaagcgtggtgacaaaattgtgtaccacactctggagagccccgtcgagtttcatcttgacggtgaggttctttcacttgacaaactaaagagtctcttatccctgcgggaggttaagactataaaagtgttcacaactgtggacaacactaatctccacacacagcttgtggatatgtctatgacatatggacagcagtttggtccaacatacttggatggtgctgatgttacaaaaattaaacctcatgtaaatcatgagggtaagactttctttgtactacctagtgatgacacactacgtagtgaagctttcgagtactaccatactcttgatgagagttttcttggtaggtacatgtctgctttaaaccacacaaagaaatggaaatttcctcaagttggtggtttaacttcaattaaatgggctgataacaattgttatttgtctagtgttttattagcacttcaacagcttgaagtcaaattcaatgcaccagcacttcaagaggcttattatagagcccgtgctggtgatgctgctaacttttgtgcactcatactcgcttacagtaataaaactgttggcgagcttggtgatgtcagagaaactatgacccatcttctacagcatgctaatttggaatctgcaaagcgagttcttaatgtggtgtgtaaacattgtggtcagaaaactactaccttaacgggtgtagaagctgtgatgtatatgggtactctatcttatgataatcttaagacaggtgtttccattccatgtgtgtgtggtcgtgatgctacacaatatctagtacaacaagagtcttcttttgttatgatgtctgcaccacctgctgagtataaattacagcaaggtacattcttatgtgcgaatgagtacactggtaactatcagtgtggtcattacactcatataactgctaaggagaccctctatcgtattgacggagctcaccttacaaagatgtcagagtacaaaggaccagtgactgatgttttctacaaggaaacatcttacactacaaccatcaagcctgtgtcgtataaactcgatggagttacttacacagagattgaaccaaaattggatgggtattataaaaaggataatgcttactatacagagcagcctatagaccttgtaccaactcaaccattaccaaatgcgagttttgataatttcaaactcacatgttctaacacaaaatttgctgatgatttaaatcaaatgacaggcttcacaaagccagcttcacgagagctatctgtcacattcttcccagacttgaatggcgatgtagtggctattgactatagacactattcagcgagtttcaagaaaggtgctaaattactgcataagccaattgtttggcacattaaccaggctacaaccaagacaacgttcaaaccaaacacttggtgtttacgttgtctttggagtacaaagccagtagatacttcaaattcatttgaagttctggcagtagaagacacacaaggaatggacaatcttgcttgtgaaagtcaacaacccacctctgaagaagtagtggaaaatcctaccatacagaaggaagtcatagagtgtgacgtgaaaactaccgaagttgtaggcaatgtcatacttaaaccatcagatgaaggtgttaaagtaacacaagagttaggtcatgaggatcttatggctgcttatgtggaaaacacaagcattaccattaagaaacctaatgagctttcactagccttaggtttaaaaacaattgccactcatggtgttgctgcaattaatagtgttccttggagtaaaattttggcttatgtcaaaccattcttaggacaagcagcaattacaacatcaaattgcgctaagagattagcacaacgtgtgtttaacaattatatgccttatgtgtttacattattgttccaattgtgtacttttactaaaagtaccaattctagaattagagcttcactacctacaactattgctaaaaatagtgttaagagtgttgctaaattatgtttggatgccggcattaattatgtgaagtcacccaaattttctaaattgttcacaatcgctatgtggctattgttgttaagtatttgcttaggttctctaatctgtgtaactgctgcttttggtgtactcttatctaattttggtgctccttcttattgtaatggcgttagagaattgtatcttaattcgtctaacgttactactatggatttctgtgaaggttcttttccttgcagcatttgtttaagtggattagactcccttgattcttatccagctcttgaaaccattcaggtgacgatttcatcgtacaagctagacttgacaattttaggtctggccgctgagtgggttttggcatatatgttgttcacaaaattcttttatttattaggtctttcagctataatgcaggtgttctttggctattttgctagtcatttcatcagcaattcttggctcatgtggtttatcattagtattgtacaaatggcacccgtttctgcaatggttaggatgtacatcttctttgcttctttctactacatatggaagagctatgttcatatcatggatggttgcacctcttcgacttgcatgatgtgctataagcgcaatcgtgccacacgcgttgagtgtacaactattgttaatggcatgaagagatctttctatgtctatgcaaatggaggccgtggcttctgcaagactcacaattggaattgtctcaattgtgacacattttgcactggtagtacattcattagtgatgaagttgctcgtgatttgtcactccagtttaaaagaccaatcaaccctactgaccagtcatcgtatattgttgatagtgttgctgtgaaaaatggcgcgcttcacctctactttgacaaggctggtcaaaagacctatgagagacatccgctctcccattttgtcaatttagacaatttgagagctaacaacactaaaggttcactgcctattaatgtcatagtttttgatggcaagtccaaatgcgacgagtctgcttctaagtctgcttctgtgtactacagtcagctgatgtgccaacctattctgttgcttgaccaagctcttgtatcagacgttggagatagtactgaagtttccgttaagatgtttgatgcttatgtcgacaccttttcagcaacttttagtgttcctatggaaaaacttaaggcacttgttgctacagctcacagcgagttagcaaagggtgtagctttagatggtgtcctttctacattcgtgtcagctgcccgacaaggtgttgttgataccgatgttgacacaaaggatgttattgaatgtctcaaactttcacatcactctgacttagaagtgacaggtgacagttgtaacaatttcatgctcacctataataaggttgaaaacatgacgcccagagatcttggcgcatgtattgactgtaatgcaaggcatatcaatgcccaagtagcaaaaagtcacaatgtttcactcatctggaatgtaaaagactacatgtctttatctgaacagctgcgtaaacaaattcgtagtgctgccaagaagaacaacataccttttagactaacttgtgctacaactagacaggttgtcaatgtcataactactaaaatctcactcaagggtggtaagattgttagtacttgttttaaacttatgcttaaggccacattattgtgcgttcttgctgcattggtttgttatatcgttatgccagtacatacattgtcaatccatgatggttacacaaatgaaatcattggttacaaagccattcaggatggtgtcactcgtgacatcatttctactgatgattgttttgcaaataaacatgctggttttgacgcatggtttagccagcgtggtggttcatacaaaaatgacaaaagctgccctgtagtagctgctatcattacaagagagattggtttcatagtgcctggcttaccgggtactgtgctgagagcaatcaatggtgacttcttgcattttctacctcgtgtttttagtgctgttggcaacatttgctacacaccttccaaactcattgagtatagtgattttgctacctctgcttgcgttcttgctgctgagtgtacaatttttaaggatgctatgggcaaacctgtgccatattgttatgacactaatttgctagagggttctatttcttatagtgagcttcgtccagacactcgttatgtgcttatggatggttccatcatacagtttcctaacacttacctggagggttctgttagagtagtaacaacttttgatgctgagtactgtagacatggtacatgcgaaaggtcagaagtaggtatttgcctatctaccagtggtagatgggttcttaataatgagcattacagagctctatcaggagttttctgtggtgttgatgcgatgaatctcatagctaacatctttactcctcttgtgcaacctgtgggtgctttagatgtgtctgcttcagtagtggctggtggtattattgccatattggtgacttgtgctgcctactactttatgaaattcagacgtgtttttggtgagtacaaccatgttgttgctgctaatgcacttttgtttttgatgtctttcactatactctgtctggtaccagcttacagctttctgccgggagtctactcagtcttttacttgtacttgacattctatttcaccaatgatgtttcattcttggctcaccttcaatggtttgccatgttttctcctattgtgcctttttggataacagcaatctatgtattctgtatttctctgaagcactgccattggttctttaacaactatcttaggaaaagagtcatgtttaatggagttacatttagtaccttcgaggaggctgctttgtgtacctttttgctcaacaaggaaatgtacctaaaattgcgtagcgagacactgttgccacttacacagtataacaggtatcttgctctatataacaagtacaagtatttcagtggagccttagatactaccagctatcgtgaagcagcttgctgccacttagcaaaggctctaaatgactttagcaactcaggtgctgatgttctctaccaaccaccacagacatcaatcacttctgctgttctgcagagtggttttaggaaaatggcattcccgtcaggcaaagttgaagggtgcatggtacaagtaacctgtggaactacaactcttaatggattgtggttggatgacacagtatactgtccaagacatgtcatttgcacagcagaagacatgcttaatcctaactatgaagatctgctcattcgcaaatccaaccatagctttcttgttcaggctggcaatgttcaacttcgtgttattggccattctatgcaaaattgtctgcttaggcttaaagttgatacttctaaccctaagacacccaagtataaatttgtccgtatccaacctggtcaaacattttcagttctagcatgctacaatggttcaccatctggtgtttatcagtgtgccatgagacctaatcataccattaaaggttctttccttaatggatcatgtggtagtgttggttttaacattgattatgattgcgtgtctttctgctatatgcatcatatggagcttccaacaggagtacacgctggtactgacttagaaggtaaattctatggtccatttgttgacagacaaactgcacaggctgcaggtacagacacaaccataacattaaatgttttggcatggctgtatgctgctgttatcaatggtgataggtggtttcttaatagattcaccactactttgaatgactttaaccttgtggcaatgaagtacaactatgaacctttgacacaagatcatgttgacatattgggacctctttctgctcaaacaggaattgccgtcttagatatgtgtgctgctttgaaagagctgctgcagaatggtatgaatggtcgtactatccttggtagcactattttagaagatgagtttacaccatttgatgttgttagacaatgctctggtgttaccttccaaggtaagttcaagaaaattgttaagggcactcatcattggatgcttttaactttcttgacatcactattgattcttgttcaaagtacacagtggtcactgtttttctttgtttacgagaatgctttcttgccatttactcttggtattatggcaattgctgcatgtgctatgctgcttgttaagcataagcacgcattcttgtgcttgtttctgttaccttctcttgcaacagttgcttactttaatatggtctacatgcctgctagctgggtgatgcgtatcatgacatggcttgaattggctgacactagcttgtctggttataggcttaaggattgtgttatgtatgcttcagctttagttttgcttattctcatgacagctcgcactgtttatgatgatgctgctagacgtgtttggacactgatgaatgtcattacacttgtttacaaagtctactatggtaatgctttagatcaagctatttccatgtgggccttagttatttctgtaacctctaactattctggtgtcgttacgactatcatgtttttagctagagctatagtgtttgtgtgtgttgagtattacccattgttatttattactggcaacaccttacagtgtatcatgcttgtttattgtttcttaggctattgttgctgctgctactttggccttttctgtttactcaaccgttacttcaggcttactcttggtgtttatgactacttggtctctacacaagaatttaggtatatgaactcccaggggcttttgcctcctaagagtagtattgatgctttcaagcttaacattaagttgttgggtattggaggtaaaccatgtatcaaggttgctactgtacagtctaaaatgtctgacgtaaagtgcacatctgtggtactgctctcggttcttcaacaacttagagtagagtcatcttctaaattgtgggcacaatgtgtacaactccacaatgatattcttcttgcaaaagacacaactgaagctttcgagaagatggtttctcttttgtctgttttgctatccatgcagggtgctgtagacattaataggttgtgcgaggaaatgctcgataaccgtgctactcttcaggctattgcttcagaatttagttctttaccatcatatgccgcttatgccactgcccaggaggcctatgagcaggctgtagctaatggtgattctgaagtcgttctcaaaaagttaaagaaatctttgaatgtggctaaatctgagtttgaccgtgatgctgccatgcaacgcaagttggaaaagatggcagatcaggctatgacccaaatgtacaaacaggcaagatctgaggacaagagggcaaaagtaactagtgctatgcaaacaatgctcttcactatgcttaggaagcttgataatgatgcacttaacaacattatcaacaatgcgcgtgatggttgtgttccactcaacatcataccattgactacagcagccaaactcatggttgttgtccctgattatggtacctacaagaacacttgtgatggtaacacctttacatatgcatctgcactctgggaaatccagcaagttgttgatgcggatagcaagattgttcaacttagtgaaattaacatggacaattcaccaaatttggcttggcctcttattgttacagctctaagagccaactcagctgttaaactacagaataatgaactgagtccagtagcactacgacagatgtcctgtgcggctggtaccacacaaacagcttgtactgatgacaatgcacttgcctactataacaattcgaagggaggtaggtttgtgctggcattactatcagaccaccaagatctcaaatgggctagattccctaagagtgatggtacaggtacaatttacacagaactggaaccaccttgtaggtttgttacagacacaccaaaagggcctaaagtgaaatacttgtacttcatcaaaggcttaaacaacctaaatagaggtatggtgctgggcagtttagctgctacagtacgtcttcaggctggaaatgctacagaagtacctgccaattcaactgtgctttccttctgtgcttttgcagtagaccctgctaaagcatataaggattacctagcaagtggaggacaaccaatcaccaactgtgtgaagatgttgtgtacacacactggtacaggacaggcaattactgtaacaccagaagctaacatggaccaagagtcctttggtggtgcttcatgttgtctgtattgtagatgccacattgaccatccaaatcctaaaggattctgtgacttgaaaggtaagtacgtccaaatacctaccacttgtgctaatgacccagtgggttttacacttagaaacacagtctgtaccgtctgcggaatgtggaaaggttatggctgtagttgtgaccaactccgcgaacccttgatgcagtctgcggatgcatcaacgtttttaaacgggtttgcggtgtaagtgcagcccgtcttacaccgtgcggcacaggcactagtactgatgtcgtctacagggcttttgatatttacaacgaaaaagttgctggttttgcaaagttcctaaaaactaattgctgtcgcttccaggagaaggatgaggaaggcaatttattagactcttactttgtagttaagaggcatactatgtctaactaccaacatgaagagactatttataacttggttaaagattgtccagcggttgctgtccatgactttttcaagtttagagtagatggtgacatggtaccacatatatcacgtcagcgtctaactaaatacacaatggctgatttagtctatgctctacgtcattttgatgagggtaattgtgatacattaaaagaaatactcgtcacatacaattgctgtgatgatgattatttcaataagaaggattggtatgacttcgtagagaatcctgacatcttacgcgtatatgctaacttaggtgagcgtgtacgccaatcattattaaagactgtacaattctgcgatgctatgcgtgatgcaggcattgtaggcgtactgacattagataatcaggatcttaatgggaactggtacgatttcggtgatttcgtacaagtagcaccaggctgcggagttcctattgtggattcatattactcattgctgatgcccatcctcactttgactagggcattggctgctgagtcccatatggatgctgatctcgcaaaaccacttattaagtgggatttgctgaaatatgattttacggaagagagactttgtctcttcgaccgttattttaaatattgggaccagacataccatcccaattgtattaactgtttggatgataggtgtatccttcattgtgcaaactttaatgtgttattttctactgtgtttccacctacaagttttggaccactagtaagaaaaatatttgtagatggtgttccttttgttgtttcaactggataccattttcgtgagttaggagtcgtacataatcaggatgtaaacttacatagctcgcgtctcagtttcaaggaacttttagtgtatgctgctgatccagctatgcatgcagcttctggcaatttattgctagataaacgcactacatgcttttcagtagctgcactaacaaacaatgttgcttttcaaactgtcaaacccggtaattttaataaagacttttatgactttgctgtgtctaaaggtttctttaaggaaggaagttctgttgaactaaaacacttcttctttgctcaggatggcaacgctgctatcagtgattatgactattatcgttataatctgccaacaatgtgtgatatcagacaactcctattcgtagttgaagttgttgataaatactttgattgttacgatggtggctgtattaatgccaaccaagtaatcgttaacaatctggataaatcagctggtttcccatttaataaatggggtaaggctagactttattatgactcaatgagttatgaggatcaagatgcacttttcgcgtatactaagcgtaatgtcatccctactataactcaaatgaatcttaagtatgccattagtgcaaagaatagagctcgcaccgtagctggtgtctctatctgtagtactatgacaaatagacagtttcatcagaaattattgaagtcaatagccgccactagaggagctactgtggtaattggaacaagcaagttttacggtggctggcataatatgttaaaaactgtttacagtgatgtagaaactccacaccttatgggttgggattatccaaaatgtgacagagccatgcctaacatgcttaggataatggcctctcttgttcttgctcgcaaacataacacttgctgtaacttatcacaccgtttctacaggttagctaacgagtgtgcgcaagtattaagtgagatggtcatgtgtggcggctcactatatgttaaaccaggtggaacatcatccggtgatgctacaactgcttatgctaatagtgtctttaacatttgtcaagctgttacagccaatgtaaatgcacttctttcaactgatggtaataagatagctgacaagtatgtccgcaatctacaacacaggctctatgagtgtctctatagaaatagggatgttgatcatgaattcgtggatgagttttacgcttacctgcgtaaacatttctccatgatgattctttctgatgatgccgttgtgtgctataacagtaactatgcggctcaaggtttagtagctagcattaagaactttaaggcagttctttattatcaaaataatgtgttcatgtctgaggcaaaatgttggactgagactgaccttactaaaggacctcacgaattttgctcacagcatacaatgctagttaaacaaggagatgattacgtgtacctgccttacccagatccatcaagaatattaggcgcaggctgttttgtcgatgatattgtcaaaacagatggtacacttatgattgaaaggttcgtgtcactggctattgatgcttacccacttacaaaacatcctaatcaggagtatgctgatgtctttcacttgtatttacaatacattagaaagttacatgatgagcttactggccacatgttggacatgtattccgtaatgctaactaatgataacacctcacggtactgggaacctgagttttatgaggctatgtacacaccacatacagtcttgcaggctgtaggtgcttgtgtattgtgcaattcacagacttcacttcgttgcggtgcctgtattaggagaccattcctatgttgcaagtgctgctatgaccatgtcatttcaacatcacacaaattagtgttgtctgttaatccctatgtttgcaatgccccaggttgtgatgtcactgatgtgacacaactgtatctaggaggtatgagctattattgcaagtcacataagcctcccattagttttccattatgtgctaatggtcaggtttttggtttatacaaaaacacatgtgtaggcagtgacaatgtcactgacttcaatgcgatagcaacatgtgattggactaatgctggcgattacatacttgccaacacttgtactgagagactcaagcttttcgcagcagaaacgctcaaagccactgaggaaacatttaagctgtcatatggtattgccactgtacgcgaagtactctctgacagagaattgcatctttcatgggaggttggaaaacctagaccaccattgaacagaaactatgtctttactggttaccgtgtaactaaaaatagtaaagtacagattggagagtacacctttgaaaaaggtgactatggtgatgctgttgtgtacagaggtactacgacatacaagttgaatgttggtgattactttgtgttgacatctcacactgtaatgccacttagtgcacctactctagtgtcacaagagcactatgtgagaattactggcttgtacccaacactcaacatctcagatgagttttctagcaatgttgcaaattatcaaaaggtcggcatgcaaaagtactctacactccaaggaccacctggtactggtaagagtcattttgccatcggacttgctctctattacccatctgctcgcatagtgtatacggcatgctctcatgcagctgttgatgccctatgtgaaaaggcattaaaatatttgcccatagataaatgtagtagaatcatacctgcgcgtgcgcgcgtagagtgttttgataaattcaaagtgaattcaacactagaacagtatgttttctgcactgtaaatgcattgccagaaacaactgctgacattgtagtctttgatgaaatctctatggctactaattatgacttgagtgttgtcaatgctagacttcgtgcaaaacactacgtctatattggcgatcctgctcaattaccagccccccgcacattgctgactaaaggcacactagaaccagaatattttaattcagtgtgcagacttatgaaaacaataggtccagacatgttccttggaacttgtcgccgttgtcctgctgaaattgttgacactgtgagtgctttagtttatgacaataagctaaaagcacacaaggataagtcagctcaatgcttcaaaatgttctacaaaggtgttattacacatgatgtttcatctgcaatcaacagacctcaaataggcgttgtaagagaatttcttacacgcaatcctgcttggagaaaagctgtttttatctcaccttataattcacagaacgctgtagcttcaaaaatcttaggattgcctacgcagactgttgattcatcacagggttctgaatatgactatgtcatattcacacaaactactgaaacagcacactcttgtaatgtcaaccgcttcaatgtggctatcacaagggcaaaaattggcattttgtgcataatgtctgatagagatctttatgacaaactgcaatttacaagtctagaaataccacgtcgcaatgtggctacattacaagcagaaaatgtaactggactttttaaggactgtagtaagatcattactggtcttcatcctacacaggcacctacacacctcagcgttgatataaagttcaagactgaaggattatgtgttgacataccaggcataccaaaggacatgacctaccgtagactcatctctatgatgggtttcaaaatgaattaccaagtcaatggttaccctaatatgtttatcacccgcgaagaagctattcgtcacgttcgtgcgtggattggctttgatgtagagggctgtcatgcaactagagatgctgtgggtactaacctacctctccagctaggattttctacaggtgttaacttagtagctgtaccgactggttatgttgacactgaaaataacacagaattcaccagagttaatgcaaaacctccaccaggtgaccagtttaaacatcttataccactcatgtataaaggcttgccctggaatgtagtgcgtattaagatagtacaaatgctcagtgatacactgaaaggattgtcagacagagtcgtgttcgtcctttgggcgcatggctttgagcttacatcaatgaagtactttgtcaagattggacctgaaagaacgtgttgtctgtgtgacaaacgtgcaacttgcttttctacttcatcagatacttatgcctgctggaatcattctgtgggttttgactatgtctataacccatttatgattgatgttcagcagtggggctttacgggtaaccttcagagtaaccatgaccaacattgccaggtacatggaaatgcacatgtggctagttgtgatgctatcatgactagatgtttagcagtccatgagtgctttgttaagcgcgttgattggtctgttgaataccctattataggagatgaactgagggttaattctgcttgcagaaaagtacaacacatggttgtgaagtctgcattgcttgctgataagtttccagttcttcatgacattggaaatccaaaggctatcaagtgtgtgcctcaggctgaagtagaatggaagttctacgatgctcagccatgtagtgacaaagcttacaaaatagaggaactcttctattcttatgctacacatcacgataaattcactgatggtgtttgtttgttttggaattgtaacgttgatcgttacccagccaatgcaattgtgtgtaggtttgacacaagagtcttgtcaaacttgaacttaccaggctgtgatggtggtagtttgtatgtgaataagcatgcattccacactccagctttcgataaaagtgcatttactaatttaaagcaattgcctttcttttactattctgatagtccttgtgagtctcatggcaaacaagtagtgtcggatattgattatgttccactcaaatctgctacgtgtattacacgatgcaatttaggtggtgctgtttgcagacaccatgcaaatgagtaccgacagtacttggatgcatataatatgatgatttctgctggatttagcctatggatttacaaacaatttgatacttataacctgtggaatacatttaccaggttacagagtttagaaaatgtggcttataatgttgttaataaaggacactttgatggacacgccggcgaagcacctgtttccatcattaataatgctgtttacacaaaggtagatggtattgatgtggagatctttgaaaataagacaacacttcctgttaatgttgcatttgagctttgggctaagcgtaacattaaaccagtgccagagattaagatactcaataatttgggtgttgatatcgctgctaatactgtaatctgggactacaaaagagaagccccagcacatgtatctacaataggtgtctgcacaatgactgacattgccaagaaacctactgagagtgcttgttcttcacttactgtcttgtttgatggtagagtggaaggacaggtagacctttttagaaacgcccgtaatggtgttttaataacagaaggttcagtcaaaggtctaacaccttcaaagggaccagcacaagctagcgtcaatggagtcacattaattggagaatcagtaaaaacacagtttaactactttaagaaagtagacggcattattcaacagttgcctgaaacctactttactcagagcagagacttagaggattttaagcccagatcacaaatggaaactgactttctcgagctcgctatggatgaattcatacagcgatataagctcgagggctatgccttcgaacacatcgtttatggagatttcagtcatggacaacttggcggtcttcatttaatgataggcttagccaagcgctcacaagattcaccacttaaattagaggattttatccctatggacagcacagtgaaaaattacttcataacagatgcgcaaacaggttcatcaaaatgtgtgtgttctgtgattgatcttttacttgatgactttgtcgagataataaagtcacaagatttgtcagtgatttcaaaagtggtcaaggttacaattgactatgctgaaatttcattcatgctttggtgtaaggatggacatgttgaaaccttctacccaaaactacaagcaagtcaagcgtggcaaccaggtgttgcgatgcctaacttgtacaagatgcaaagaatgcttcttgaaaagtgtgaccttcagaattatggtgaaaatgctgttataccaaaaggaataatgatgaatgtcgcaaagtatactcaactgtgtcaatacttaaatacacttactttagctgtaccctacaacatgagagttattcactttggtgctggctctgataaaggagttgcaccaggtacagctgtgctcagacaatggttgccaactggcacactacttgtcgattcagatcttaatgacttcgtctccgacgcagattctactttaattggagactgtgcaacagtacatacggctaataaatgggaccttattattagcgatatgtatgaccctaggaccaaacatgtgacaaaagagaatgactctaaagaagggtttttcacttatctgtgtggatttataaagcaaaaactagccctgggtggttctatagctgtaaagataacagagcattcttggaatgctgacctttacaagcttatgggccatttctcatggtggacagcttttgttacaaatgtaaatgcatcatcatcggaagcatttttaattggggctaactatcttggcaagccgaaggaacaaattgatggctataccatgcatgctaactacattttctggaggaacacaaatcctatccagttgtcttcctattcactctttgacatgagcaaatttcctcttaaattaagaggaactgctgtaatgtctcttaaggagaatcaaatcaatgatatgatttattctcttctggaaaaaggtaggcttatcattagagaaaacaacagagttgtggtttcaagtgatattcttgttaacaactaaacgaacatgtttattttcttattatttcttactctcactagtggtagtgaccttgaccggtgcaccacttttgatgatgttcaagctcctaattacactcaacatacttcatctatgaggggggtttactatcctgatgaaatttttagatcagacactctttatttaactcaggatttatttcttccattttattctaatgttacagggtttcatactattaatcatacgtttggcaaccctgtcataccttttaaggatggtatttattttgctgccacagagaaatcaaatgttgtccgtggttgggtttttggttctaccatgaacaacaagtcacagtcggtgattattattaacaattctactaatgttgttatacgagcatgtaactttgaattgtgtgacaaccctttctttgctgtttctaaacccatgggtacacagacacatactatgatattcgataatgcatttaattgcactttcgagtacatatctgatgccttttcgcttgatgtttcagaaaagtcaggtaattttaaacacttacgagagtttgtgtttaaaaataaagatgggtttctctatgtttataagggctatcaacctatagatgtagttcgtgatctaccttctggttttaacactttgaaacctatttttaagttgcctcttggtattaacattacaaattttagagccattcttacagccttttcacctgctcaagacatttggggcacgtcagctgcagcctattttgttggctatttaaagccaactacatttatgctcaagtatgatgaaaatggtacaatcacagatgctgttgattgttctcaaaatccacttgctgaactcaaatgctctgttaagagctttgagattgacaaaggaatttaccagacctctaatttcagggttgttccctcaggagatgttgtgagattccctaatattacaaacttgtgtccttttggagaggtttttaatgctactaaattcccttctgtctatgcatgggagagaaaaaaaatttctaattgtgttgctgattactctgtgctctacaactcaacatttttttcaacctttaagtgctatggcgtttctgccactaagttgaatgatctttgcttctccaatgtctatgcagattcttttgtagtcaagggagatgatgtaagacaaatagcgccaggacaaactggtgttattgctgattataattataaattgccagatgatttcatgggttgtgtccttgcttggaatactaggaacattgatgctacttcaactggtaattataattataaatataggtatcttagacatggcaagcttaggccctttgagagagacatatctaatgtgcctttctcccctgatggcaaaccttgcaccccacctgctcttaattgttattggccattaaatgattatggtttttacaccactactggcattggctaccaaccttacagagttgtagtactttcttttgaacttttaaatgcaccggccacggtttgtggaccaaaattatccactgaccttattaagaaccagtgtgtcaattttaattttaatggactcactggtactggtgtgttaactccttcttcaaagagatttcaaccatttcaacaatttggccgtgatgtttctgatttcactgattccgttcgagatcctaaaacatctgaaatattagacatttcaccttgctcttttgggggtgtaagtgtaattacacctggaacaaatgcttcatctgaagttgctgttctatatcaagatgttaactgcactgatgtttctacagcaattcatgcagatcaactcacaccagcttggcgcatatattctactggaaacaatgtattccagactcaagcaggctgtcttataggagctgagcatgtcgacacttcttatgagtgcgacattcctattggagctggcatttgtgctagttaccatacagtttctttattacgtagtactagccaaaaatctattgtggcttatactatgtctttaggtgctgatagttcaattgcttactctaataacaccattgctatacctactaacttttcaattagcattactacagaagtaatgcctgtttctatggctaaaacctccgtagattgtaatatgtacatctgcggagattctactgaatgtgctaatttgcttctccaatatggtagcttttgcacacaactaaatcgtgcactctcaggtattgctgctgaacaggatcgcaacacacgtgaagtgttcgctcaagtcaaacaaatgtacaaaaccccaactttgaaatattttggtggttttaatttttcacaaatattacctgaccctctaaagccaactaagaggtcttttattgaggacttgctctttaataaggtgacactcgctgatgctggcttcatgaagcaatatggcgaatgcctaggtgatattaatgctagagatctcatttgtgcgcagaagttcaatggacttacagtgttgccacctctgctcactgatgatatgattgctgcctacactgctgctctagttagtggtactgccactgctggatggacatttggtgctggcgctgctcttcaaataccttttgctatgcaaatggcatataggttcaatggcattggagttacccaaaatgttctctatgagaaccaaaaacaaatcgccaaccaatttaacaaggcgattagtcaaattcaagaatcacttacaacaacatcaactgcattgggcaagctgcaagacgttgttaaccagaatgctcaagcattaaacacacttgttaaacaacttagctctaattttggtgcaatttcaagtgtgctaaatgatatcctttcgcgacttgataaagtcgaggcggaggtacaaattgacaggttaattacaggcagacttcaaagccttcaaacctatgtaacacaacaactaatcagggctgctgaaatcagggcttctgctaatcttgctgctactaaaatgtctgagtgtgttcttggacaatcaaaaagagttgacttttgtggaaagggctaccaccttatgtccttcccacaagcagccccgcatggtgttgtcttcctacatgtcacgtatgtgccatcccaggagaggaacttcaccacagcgccagcaatttgtcatgaaggcaaagcatacttccctcgtgaaggtgtttttgtgtttaatggcacttcttggtttattacacagaggaacttcttttctccacaaataattactacagacaatacatttgtctcaggaaattgtgatgtcgttattggcatcattaacaacacagtttatgatcctctgcaacctgagcttgactcattcaaagaagagctggacaagtacttcaaaaatcatacatcaccagatgttgatcttggcgacatttcaggcattaacgcttctgtcgtcaacattcaaaaagaaattgaccgcctcaatgaggtcgctaaaaatttaaatgaatcactcattgaccttcaagaattgggaaaatatgagcaatatattaaatggccttggtatgtttggctcggcttcattgctggactaattgccatcgtcatggttacaatcttgctttgttgcatgactagttgttgcagttgcctcaagggtgcatgctcttgtggttcttgctgcaagtttgatgaggatgactctgagccagttctcaagggtgtcaaattacattacacataaacgaacttatggatttgtttatgagattttttactcttggatcaattactgcacagccagtaaaaattgacaatgcttctcctgcaagtactgttcatgctacagcaacgataccgctacaagcctcactccctttcggatggcttgttattggcgttgcatttcttgctgtttttcagagcgctaccaaaataattgcgctcaataaaagatggcagctagccctttataagggcttccagttcatttgcaatttactgctgctatttgttaccatctattcacatcttttgcttgtcgctgcaggtatggaggcgcaatttttgtacctctatgccttgatatattttctacaatgcatcaacgcatgtagaattattatgagatgttggctttgttggaagtgcaaatccaagaacccattactttatgatgccaactactttgtttgctggcacacacataactatgactactgtataccatataacagtgtcacagatacaattgtcgttactgaaggtgacggcatttcaacaccaaaactcaaagaagactaccaaattggtggttattctgaggataggcactcaggtgttaaagactatgtcgttgtacatggctatttcaccgaagtttactaccagcttgagtctacacaaattactacagacactggtattgaaaatgctacattcttcatctttaacaagcttgttaaagacccaccgaatgtgcaaatacacacaatcgacggctcttcaggagttgctaatccagcaatggatccaatttatgatgagccgacgacgactactagcgtgcctttgtaagcacaagaaagtgagtacgaacttatgtactcattcgtttcggaagaaacaggtacgttaataaatagcgtacttctttttcttgctttcgtggtattcttgctagtcacactagccatccttactgcgcttcgattgtgtgcgtactgctgctatattgttaacgtgagtttagtaaaaccaacggtttacgtctactcgcgtgttaaaaatctgaactcttctgaaggagttcctgatcttctggtctaaacgaactaactattattattattctgtttggaactttaacattgcttatcatggcagacaacggtactattaccgttgaggagcttaaacaactcctggaacaatggaacctagtaataggtttcctatgcctagcctggattatgttactacaatttgcctattctaatcggaacaggtttttgtacataataaagcttgttttcctctggctcttgtggccagtaacacttgcttgttttgtgcttgctgctgtctacagaattaattgggtgactggcgggattgcgattgcaatggcttgtattgtaggcttgatgtggcttagctacttcgttgcttccttcaggctgtttgctcgtacccgctcaatgtggtcattcaacccagaaacaaacattcttctcaatgtgcctctccgggggacaattgtgaccagaccgctcatggaaagtgaacttgtcattggtgctgtgatcattcgtggtcacttgcgaatggccggacactccctagggcgctgtgacattaaggacctgccaaaagagatcactgtggctacatcacgaacgctttcttattacaaattaggagcgtcgcagcgtgtaggcactgattcaggttttgctgcatacaaccgctaccgtattggaaactataaattaaatacagaccacgccggtagcaacgacaatattgctttgctagtacagtaagtgacaacagatgtttcatcttgttgacttccaggttacaatagcagagatattgattatcattatgaggactttcaggattgctatttggaatcttgacgttataataagttcaatagtgagacaattatttaagcctctaactaagaagaattattcggagttagatgatgaagaacctatggagttagattatccataaaacgaacatgaaaattattctcttcctgacattgattgtatttacatcttgcgagctatatcactatcaggagtgtgttagaggtacgactgtactactaaaagaaccttgcccatcaggaacatacgagggcaattcaccatttcaccctcttgctgacaataaatttgcactaacttgcactagcacacactttgcttttgcttgtgctgacggtactcgacatacctatcagctgcgtgcaagatcagtttcaccaaaacttttcatcagacaagaggaggttcaacaagagctctactcgccactttttctcattgttgctgctctagtatttttaatactttgcttcaccattaagagaaagacagaatgaatgagctcactttaattgacttctatttgtgctttttagcctttctgctattccttgttttaataatgcttattatattttggttttcactcgaaatccaggatctagaagaaccttgtaccaaagtctaaacgaacatgaaacttctcattgttttgacttgtatttctctatgcagttgcatatgcactgtagtacagcgctgtgcatctaataaacctcatgtgcttgaagatccttgtaaggtacaacactaggggtaatacttatagcactgcttggctttgtgctctaggaaaggttttaccttttcatagatggcacactatggttcaaacatgcacacctaatgttactatcaactgtcaagatccagctggtggtgcgcttatagctaggtgttggtaccttcatgaaggtcaccaaactgctgcatttagagacgtacttgttgttttaaataaacgaacaaattaaaatgtctgataatggaccccaatcaaaccaacgtagtgccccccgcattacatttggtggacccacagattcaactgacaataaccagaatggaggacgcaatggggcaaggccaaaacagcgccgaccccaaggtttacccaataatactgcgtcttggttcacagctctcactcagcatggcaaggaggaacttagattccctcgaggccagggcgttccaatcaacaccaatagtggtccagatgaccaaattggctactaccgaagagctacccgacgagttcgtggtggtgacggcaaaatgaaagagctcagccccagatggtacttctattacctaggaactggcccagaagcttcacttccctacggcgctaacaaagaaggcatcgtatgggttgcaactgagggagccttgaatacacccaaagaccacattggcacccgcaatcctaataacaatgctgccaccgtgctacaacttcctcaaggaacaacattgccaaaaggcttctacgcagagggaagcagaggcggcagtcaagcctcttctcgctcctcatcacgtagtcgcggtaattcaagaaattcaactcctggcagcagtaggggaaattctcctgctcgaatggctagcggaggtggtgaaactgccctcgcgctattgctgctagacagattgaaccagcttgagagcaaagtttctggtaaaggccaacaacaacaaggccaaactgtcactaagaaatctgctgctgaggcatctaaaaagcctcgccaaaaacgtactgccacaaaacagtacaacgtcactcaagcatttgggagacgtggtccagaacaaacccaaggaaatttcggggaccaagacctaatcagacaaggaactgattacaaacattggccgcaaattgcacaatttgctccaagtgcctctgcattctttggaatgtcacgcattggcatggaagtcacaccttcgggaacatggctgacttatcatggagccattaaattggatgacaaagatccacaattcaaagacaacgtcatactgctgaacaagcacattgacgcatacaaaacattcccaccaacagagcctaaaaaggacaaaaagaaaaagactgatgaagctcagcctttgccgcagagacaaaagaagcagcccactgtgactcttcttcctgcggctgacatggatgatttctccagacaacttcaaaattccatgagtggagcttctgctgattcaactcaggcataaacactcatgatgaccacacaaggcagatgggctatgtaaacgttttcgcaattccgtttacgatacatagtctactcttgtgcagaatgaattctcgtaactaaacagcacaagtaggtttagttaactttaatctcacatagcaatctttaatcaatgtgtaacattagggaggacttgaaagagccaccacattttcatcgaggccacgcggagtacgatcgagggtacagtgaataatgctagggagagctgcctatatggaagagccctaatgtgtaaaattaattttagtagtgctatccccatgtgattttaatagcttcttaggagaatgacaaaaaaaaaaaaaaaaaaaaaaaaaaaaaaaaaaa

SEQ ID NO: 29812 - DNA, 29727 bp, SARS Coronavirus; identical to SEQ ID NO: 29780

SEQ ID NO: 29813 - DNA, 29727 bp, SARS Coronavirus
atattaggtttttacctacccaggaaaagccaaccaacctcgatctcttgtagatctgttctctaaacgaactttaaaatctgtgtagctgtcgctcggctgcatgcctagtgcacctacgcagtataaacaataataaattttactgtcgttgacaagaaacgagtaactcgtccctcttctgcagactgcttacggtttcgtccgtgttgcagtcgatcatcagcatacctaggtttcgtccgggtgtgaccgaaaggtaagatggagagccttgttcttggtgtcaacgagaaaacacacgtccaactcagtttgcctgtccttcaggttagagacgtgctagtgcgtggcttcggggactctgtggaagaggccctatcggaggcacgtgaacacctcaaaaatggcacttgtggtctagtagagctggaaaaaggcgtactgccccagcttgaacagccctatgtgttcattaaacgttctgatgccttaagcaccaatcacggccacaaggtcgttgagctggttgcagaaatggacggcattcagtacggtcgtagcggtataacactgggagtactcgtgccacatgtgggcgaaaccccaattgcataccgcaatgttcttcttcgtaagaacggtaataagggagccggtggtcatagctatggcatcgatctaaagtcttatgacttaggtgacgagcttggcactgatcccattgaagattatgaacaaaactggaacactaagcatggcagtggtgcactccgtgaactcactcgtgagctcaatggaggtgcagtcactcgctatgtcgacaacaatttctgtggcccagatgggtaccctcttgattgcatcaaagattttctcgcacgcgcgggcaagtcaatgtgcactctttccgaacaacttgattacatcgagtcgaagagaggtgtctactgctgccgtgaccatgagcatgaaattgcctggttcactgagcgctctgataagagctacgagcaccagacacccttcgaaattaagagtgccaagaaatttgacactttcaaaggggaatgcccaaagtttgtgtttcctcttaactcaaaagtcaaagtcattcaaccacgtgttgaaaagaaaaagactgagggtttcatggggcgtatacgctctgtgtaccctgttgcatctccacaggagtgtaacaatatgcacttgtctaccttgatgaaatgtaatcattgcgatgaagtttcatggcagacgtgcgactttctgaaagccacttgtgaacattgtggcactgaaaatttagttattgaaggacctactacatgtgggtacctacctactaatgctgtagtgaaaatgccatgtcctgcctgtcaagacccagagattggacctgagcatagtgttgcagattatcacaaccactcaaacattgaaactcgactccgcaagggaggtaggactagatgttttggaggctgtgtgtttgcctatgttggctgctataataagcgtgcctactgggttcctcgtgctagtgctgatattggctcaggccatactggcattactggtgacaatgtggagaccttgaatgaggatctccttgagatactgagtcgtgaacgtgttaacattaacattgttggcgattttcatttgaatgaagaggttgccatcattttggcatctttctctgcttctacaagtgcctttattgacactataaagagtcttgattacaagtctttcaaaaccattgttgagtcctgcggtaactataaagttaccaagggaaagcccgtaaaaggtgcttggaacattggacaacagagatcagttttaacaccactgtgtggttttccctcacaggctgctggtgttatcagatcaatttttgcgcgcacacttgatgcagcaaaccactcaattcctgatttgcaaagagcagctgtcaccatacttgatggtatttctgaacagtcattacgtcttgtcgacgccatggtttatacttcagacctgctcaccaacagtgtcattattatggcatatgtaactggtggtcttgtacaacagacttctcagtggttgtctaatcttttgggcactactgttgaaaaactcaggcctatctttgaatggattgaggcgaaacttagtgcaggagttgaatttctcaaggatgcttgggagattctcaaatttctcattacaggtgtttttgacatcgtcaagggtcaaatacaggttgcttcagataacatcaaggattgtgtaaaatgcttcattgatgttgttaacaaggcactcgaaatgtgcattgatcaagtcactatcgctggcgcaaagttgcgatcactcaacttaggtgaagtcttcatcgctcaaagcaagggactttaccgtcagtgtatacgtggcaaggagcagctgcaactactcatgcctcttaaggcaccaaaagaagtaacctttcttgaaggtgattcacatgacacagtacttacctctgaggaggttgttctcaagaacggtgaactcgaagcactcgagacgcccgttgatagcttcacaaatggagctatcgttggcacaccagtctgtgtaaatggcctcatgctcttagagattaaggacaaagaacaatactgcgcattgtctcctggtttactggctacaaacaatgtctttcgcttaaaagggggtgcaccaattaaaggtgtaacctttggagaagatactgtttgggaagttcaaggttacaagaatgtgagaatcacatttgagcttgatgaacgtgttgacaaagtgcttaatgaaaagtgctctgtctacactgttgaatccggtaccgaagttactgagtttgcatgtgttgtagcagaggctgttgtgaagactttacaaccagtttctgatctccttaccaacatgggtattgatcttgatgagtggagtgtagctacattctacttatttgatgatgctggtgaagaaaacttttcatcacgtatgtattgttccttttaccctccagatgaggaagaagaggacgatgcagagtgtgaggaagaagaaattgatgaaacctgtgaacatgagtacggtacagaggatgattatcaaggtctccctctggaatttggtgcctcagctgaaacagttcgagttgaggaagaagaagaggaagactggctggatgatactactgagcaatcagagattgagccagaaccagaacctacacctgaagaaccagttaatcagtttactggttatttaaaacttactgacaatgttgccattaaatgtgttgacatcgttaaggaggcacaaagtgctaatcctatggtgattgtaaatgctgctaacatacacctgaaacatggtggtggtgtagcaggtgcactcaacaaggcaaccaatggtgccatgcaaaaggagagtgatgattacattaagctaaatggccctcttacagtaggagggtcttgtttgctttctggacataatcttgctaagaagtgtctgcatgttgttggacctaacctaaatgcaggtgaggacatccagcttcttaaggcagcatatgaaaatttcaattcacaggacatcttacttgcaccattgttgtcagcaggcatatttggtgctaaaccacttcagtctttacaagtgtgcgtgcagacggttcgtacacaggtttatattgcagtcaatgacaaagctctttatgagcaggttgtcatggattatcttgataacctgaagcctagagtggaagcacctaaacaagaggagccaccaaacacagaagattccaaaactgaggagaaatccgtcgtacagaagcctgtcgatgtgaagccaaaaattaaggcctgcattgatgaggttaccacaacactggaagaaactaagtttcttaccaataagttactcttgtttgctgatatcaatggtaagctttaccatgattctcagaacatgcttagaggtgaagatatgtctttccttgagaaggatgcaccttacatggtaggtgatgttatcactagtggtgatatcacttgtgttgtaataccctccaaaaaggctggtggcactactgagatgctctcaagagctttgaagaaagtgccagttgatgagtatataaccacgtaccctggacaaggatgtgctggttatacacttgaggaagctaagactgctcttaagaaatgcaaatctgcattttatgtactaccttcagaagcacctaatgctaaggaagagattctaggaactgtatcctggaatttgagagaaatgcttgctcatgctgaagagacaagaaaattaatgcctatatgcatggatgttagagccataatggcaaccatccaacgtaagtataaaggaattaaaattcaagagggcatcgttgactatggtgtccgattcttcttttatactagtaaagagcctgtagcttctattattacgaagctgaactctctaaatgagccgcttgtcacaatgccaattggttatgtgacacatggttttaatcttgaagaggctgcgcgctgtatgcgttctcttaaagctcctgccgtagtgtcagtatcatcaccagatgctgttactacatataatggatacctcacttcgtcatcaaagacatctgaggagcactttgtagaaacagtttctttggctggctcttacagagattggtcctattcaggacagcgtacagagttaggtgttgaatttcttaagcgtggtgacaaaattgtgtaccacactctggagagccccgtcgagtttcatcttgacggtgaggttctttcacttgacaaactaaagagtctcttatccctgcgggaggttaagactataaaagtgttcacaactgtggacaacactaatctccacacacagcttgtggatatgtctatgacatatggacagcagtttggtccaacatacttggatggtgctgatgttacaaaaattaaacctcatgtaaatcatgagggtaagactttctttgtactacctagtgatgacacactacgtagtgaagctttcgagtactaccatactcttgatgagagttttcttggtaggtacatgtctgctttaaaccacacaaagaaatggaaatttcctcaagttggtggtttaacttcaattaaatgggctgataacaattgttatttgtctagtgttttattagcacttcaacagcttgaagtcaaattcaatgcaccagcacttcaagaggcttattatagagcccgtgctggtgatgctgctaacttttgtgcactcatactcgcttacagtaataaaactgttggcgagcttggtgatgtcagagaaactatgacccatcttctacagcatgctaatttggaatctgcaaagcgagttcttaatgtggtgtgtaaacattgtggtcagaaaactactaccttaacgggtgtagaagctgtgatgtatatgggtactctatcttatgataatcttaagacaggtgtttccattccatgtgtgtgtggtcgtgatgctacacaatatctagtacaacaagagtcttcttttgttatgatgtctgcaccacctgctgagtataaattacagcaaggtacattcttatgtgcgaatgagtacactggtaactatcagtgtggtcattacactcatataactgctaaggagaccctctatcgtattgacggagctcaccttacaaagatgtcagagtacaaaggaccagtgactgatgttttctacaaggaaacatcttacactacaaccatcaagcctgtgtcgtataaactcgatggagttacttacacagagattgaaccaaaattggatgggtattataaaaaggataatgcttactatacagagcagcctatagaccttgtaccaactcaaccattaccaaatgcgagttttgataatttcaaactcacatgttctaacacaaaatttgctgatgatttaaatcaaatgacaggcttcacaaagccagcttcacgagagctatctgtcacattcttcccagacttgaatggcgatgtagtggctattgactatagacactattcagcgagtttcaagaaaggtgctaaattactgcataagccaattgtttggcacattaaccaggctacaaccaagacaacgttcaaaccaaacacttggtgtttacgttgtctttggagtacaaagccagtagatacttcaaattcatttgaagttctggcagtagaagacacacaaggaatggacaatcttgcttgtgaaagtcaacaacccacctctgaagaagtagtggaaaatcctaccatacagaaggaagtcatagagtgtgacgtgaaaactaccgaagttgtaggcaatgtcatacttaaaccatcagatgaaggtgttaaagtaacacaagagttaggtcatgaggatcttatggctgcttatgtggaaaacacaagcattaccattaagaaacctaatgagctttcactagccttaggtttaaaaacaattgccactcatggtattgctgcaattaatagtgttccttggagtaaaattttggcttatgtcaaaccattcttaggacaagcagcaattacaacatcaaattgcgctaagagattagcacaacgtgtgtttaacaattatatgccttatgtgtttacattattgttccaattgtgtacttttactaaaagtaccaattctagaattagagcttcactacctacaactattgctaaaaatagtgttaagagtgttgctaaattatgtttggatgccggcattaattatgtgaagtcacccaaattttctaaattgttcacaatcgctatgtggctattgttgttaagtatttgcttaggttctctaatctgtgtaactgctgcttttggtgtactcttatctaattttggtgctccttcttattgtaatggcgttagagaattgtatcttaattcgtctaacgttactactatggatttctgtgaaggttcttttccttgcagcatttgtttaagtggattagactcccttgattcttatccagctcttgaaaccattcaggtgacgatttcatcgtacaagctagacttgacaattttaggtctggccgctgagtgggttttggcatatatgttgttcacaaaattcttttatttattaggtctttcagctataatgcaggtgttctttggctattttgctagtcatttcatcagcaattcttggctcatgtggtttatcattagtattgtacaaatggcacccgtttctgcaatggttaggatgtacatcttctttgcttctttctactacatatggaagagctatgttcatatcatggatggttgcacctcttcgacttgcatgatgtgctataagcgcaatcgtgccacacgcgttgagtgtacaactattgttaatggcatgaagagatctttctatgtctatgcaaatggaggccgtggcttctgcaagactcacaattggaattgtctcaattgtgacacattttgcactggtagtacattcattagtgatgaagttgctcgtgatttgtcactccagtttaaaagaccaatcaaccctactgaccagtcatcgtatattgttgatagtgttgctgtgaaaaatggcgcgcttcacctctactttgacaaggctggtcaaaagacctatgagagacatccgctctcccattttgtcaatttagacaatttgagagctaacaacactaaaggttcactgcctattaatgtcatagtttttgatggcaagtccaaatgcgacgagtctgcttctaagtctgcttctgtgtactacagtcagctgatgtgccaacctattctgttgcttgaccaagctcttgtatcagacgttggagatagtactgaagtttccgttaagatgtttgatgcttatgtcgacaccttttcagcaacttttagtgttcctatggaaaaacttaaggcacttgttgctacagctcacagcgagttagcaaagggtgtagctttagatggtgtcctttctacattcgtgtcagctgcccgacaaggtgttgttgataccgatgttgacacaaaggatgttattgaatgtctcaaactttcacatcactctgacttagaagtgacaggtgacagttgtaacaatttcatgctcacctataataaggttgaaaacatgacgcccagagatcttggcgcatgtattgactgtaatgcaaggcatatcaatgcccaagtagcaaaaagtcacaatgtttcactcatctggaatgtaaaagactacatgtctttatctgaacagctgcgtaaacaaattcgtagtgctgccaagaagaacaacataccttttagactaacttgtgctacaactagacaggttgtcaatgtcataactactaaaatctcactcaagggtggtaagattgttagtacttgttttaaacttatgcttaaggccacattattgtgcgttcttgctgcattggtttgttatatcgttatgccagtacatacattgtcaatccatgatggttacacaaatgaaatcattggttacaaagccattcaggatggtgtcactcgtgacatcatttctactgatgattgttttgcaaataaacatgctggttttgacgcatggtttagccagcgtggtggttcatacaaaaatgacaaaagctgccctgtagtagctgctatcattacaagagagattggtttcatagtgcctggcttaccgggtactgtgctgagagcaatcaatggtgacttcttgcattttctacctcgtgtttttagtgctgttggcaacatttgctacacaccttccaaactcattgagtatagtgattttgctacctctgcttgcgttcttgctgctgagtgtacaatttttaaggatgctatgggcaaacctgtgccatattgttatgacactaatttgctagagggttctatttcttatagtgagcttcgtccagacactcgttatgtgcttatggatggttccatcatacagtttcctaacacttacctggagggttctgttagagtagtaacaacttttgatgctgagtactgtagacatggtacatgcgaaaggtcagaagtaggtatttgcctatctaccagtggtagatgggttcttaataatgagcattacagagctctatcaggagttttctgtggtgttgatgcgatgaatctcatagctaacatctttactcctcttgtgcaacctgtgggtgctttagatgtgtctgcttcagtagtggctggtggtattattgccatattggtgacttgtgctgcctactactttatgaaattcagacgtgtttttggtgagtacaaccatgttgttgctgctaatgcacttttgtttttgatgtctttcactatactctgtctggtaccagcttacagctttctgccgggagtctactcagtcttttacttgtacttgacattctatttcaccaatgatgtttcattcttggctcaccttcaatggtttgccatgttttctcctattgtgcctttttggataacagcaatctatgtattctgtatttctctgaagcactgccattggttctttaacaactatcttaggaaaagagtcatgtttaatggagttacatttagtaccttcgaggaggctgctttgtgtacctttttgctcaacaaggaaatgtacctaaaattgcgtagcgagacactgttgccacttacacagtataacaggtatcttgctctatataacaagtacaagtatttcagtggagccttagatactaccagctatcgtgaagcagcttgctgccacttagcaaaggctctaaatgactttagcaactcaggtgctgatgttctctaccaaccaccacagacatcaatcacttctgctgttctgcagagtggttttaggaaaatggcattcccgtcaggcaaagttgaagggtgcatggtacaagtaacctgtggaactacaactcttaatggattgtggttggatgacacagtatactgtccaagacatgtcatttgcacagcagaagacatgcttaatcctaactatgaagatctgctcattcgcaaatccaaccatagctttcttgttcaggctggcaatgttcaacttcgtgttattggccattctatgcaaaattgtctgcttaggcttaaagttgatacttctaaccctaagacacccaagtataaatttgtccgtatccaacctggtcaaacattttcagttctagcatgctacaatggttcaccatctggtgtttatcagtgtgccatgagacctaatcataccattaaaggttctttccttaatggatcatgtggtagtgttggttttaacattgattatgattgcgtgtctttctgctatatgcatcatatggagcttccaacaggagtacacgctggtactgacttagaaggtaaattctatggtccatttgttgacagacaaactgcacaggctgcaggtacagacacaaccataacattaaatgttttggcatggctgtatgctgctgttatcaatggtgataggtggtttcttaatagattcaccactactttgaatgactttaaccttgtggcaatgaagtacaactatgaacctttgacacaagatcatgttgacatattgggacctctttctgctcaaacaggaattgccgtcttagatatgtgtgctgctttgaaagagctgctgcagaatggtatgaatggtcgtactatccttggtagcactattttagaagatgagtttacaccatttgatgttgttagacaatgctctggtgttaccttccaaggtaagttcaagaaaattgttaagggcactcatcattggatgcttttaactttcttgacatcactattgattcttgttcaaagtacacagtggtcactgtttttctttgtttacgagaatgctttcttgccatttactcttggtattatggcaattgctgcatgtgctatgctgcttgttaagcataagcacgcattcttgtgcttgtttctgttaccttctcttgcaacagttgcttactttaatatggtctacatgcctgctagctgggtgatgcgtatcatgacatggcttgaattggctgacactagcttgtctggttataggcttaaggattgtgttatgtatgcttcagctttagttttgcttattctcatgacagctcgcactgtttatgatgatgctgctagacgtgtttggacactgatgaatgtcattacacttgtttacaaagtctactatggtaatgctttagatcaagctatttccatgtgggccttagttatttctgtaacctctaactattctggtgtcgttacgactatcatgtttttagctagagctatagtgtttgtgtgtgttgagtattatccattgttatttattactggcaacaccttacagtgtatcatgcttgtttattgtttcttaggctattgttgctgctgctactttggccttttctgtttactcaaccgttacttcaggcttactcttggtgtttatgactacttggtctctacacaagaatttaggtatatgaactcccaggggcttttgcctcctaagagtagtattgatgctttcaagcttaacattaagttgttgggtattggaggtaaaccatgtatcaaggttgctactgtacagtctaaaatgtctgacgtaaagtgcacatctgtggtactgctctcggttcttcaacaacttagagtagagtcatcttctaaattgtgggcacaatgtgtacaactccacaatgatattcttcttgcaaaagacacaactgaagctttcgagaagatggtttctcttttgtctgttttgctatccatgcagggtgctgtagacattaataggttgtgcgaggaaatgctcgataaccgtgctactcttcaggctattgcttcagaatttagttctttaccatcatatgccgcttatgccactgcccaggaggcctatgagcaggctgtagctaatggtgattctgaagtcgttctcaaaaagttaaagaaatctttgaatgtggctaaatctgagtttgaccgtgatgctgccatgcaacgcaagttggaaaagatggcagatcaggctatgacccaaatgtacaaacaggcaagatctgaggacaagagggcaaaagtaactagtgctatgcaaacaatgctcttcactatgcttaggaagcttgataatgatgcacttaacaacattatcaacaatgcgcgtgatggttgtgttccactcaacatcataccattgactacagcagccaaactcatggttgttgtccctgattatggtacctacaagaacacttgtgatggtaacacctttacatatgcatctgcactctgggaaatccagcaagttgttgatgcggatagcaagattgttcaacttagtgaaattaacatggacaattcaccaaatttggcttggcctcttattgttacagctctaagagccaactcagctgttaaactacagaataatgaactgagtccagtagcactacgacagatgtcctgtgcggctggtaccacacaaacagcttgtactgatgacaatgcacttgcctactataacaattcgaagggaggtaggtttgtgctggcattactatcagaccaccaagatctcaaatgggctagattccctaagagtgatggtacaggtacaatttacacagaactggaaccaccttgtaggtttgttacagacacaccaaaagggcctaaagtgaaatacttgtacttcatcaaaggcttaaacaacctaaatagaggtatggtgctgggcagtttagctgctacagtacgtcttcaggctggaaatgctacagaagtacctgccaattcaactgtgctttccttctgtgcttttgcagtagaccctgctaaagcatataaggattacctagcaagtggaggacaaccaatcaccaactgtgtgaagatgttgtgtacacacactggtacaggacaggcaattactgtaacaccagaagctaacatggaccaagagtcctttggtggtgcttcatgttgtctgtattgtagatgccacattgaccatccaaatcctaaaggattctgtgacttgaaaggtaagtacgtccaaatacctaccacttgtgctaatgacccagtgggttttacacttagaaacacagtctgtaccgtctgcggaatgtggaaaggttatggctgtagttgtgaccaactccgcgaacccttgatgcagtctgcggatgcatcaacgtttttaaacgggtttgcggtgtaagtgcagcccgtcttacaccgtgcggcacaggcactagtactgatgtcgtctacagggcttttgatatttacaacgaaaaagttgctggttttgcaaagttcctaaaaactaattgctgtcgcttccaggagaaggatgaggaaggcaatttattagactcttactttgtagttaagaggcatactatgtctaactaccaacatgaagagactatttataacttggttaaagattgtccagcggttgctgtccatgactttttcaagtttagagtagatggtgacatggtaccacatatatcacgtcagcgtctaactaaatacacaatggctgatttagtctatgctctacgtcattttgatgagggtaattgtgatacattaaaagaaatactcgtcacatacaattgctgtgatgatgattatttcaataagaaggattggtatgacttcgtagagaatcctgacatcttacgcgtatatgctaacttaggtgagcgtgtacgccaatcattattaaagactgtacaattctgcgatgctatgcgtgatgcaggcattgtaggcgtactgacattagataatcaggatcttaatgggaactggtacgatttcggtgatttcgtacaagtagcaccaggctgcggagttcctattgtggattcatattactcattgctgatgcccatcctcactttgactagggcattggctgctgagtcccatatggatgctgatctcgcaaaaccacttattaagtgggatttgctgaaatatgattttacggaagagagactttgtctcttcgaccgttattttaaatattgggaccagacataccatcccaattgtattaactgtttggatgataggtgtatccttcattgtgcaaactttaatgtgttattttctactgtgtttccacctacaagttttggaccactagtaagaaaaatatttgtagatggtgttccttttgttgtttcaactggataccattttcgtgagttaggagtcgtacataatcaggatgtaaacttacatagctcgcgtctcagtttcaaggaacttttagtgtatgctgctgatccagctatgcatgcagcttctggcaatttattgctagataaacgcactacatgcttttcagtagctgcactaacaaacaatgttgcttttcaaactgtcaaacccggtaattttaataaagacttttatgactttgctgtgtctaaaggtttctttaaggaaggaagttctgttgaactaaaacacttcttctttgctcaggatggcaacgctgctatcagtgattatgactattatcgttataatctgccaacaatgtgtgatatcagacaactcctattcgtagttgaagttgttgataaatactttgattgttacgatggtggctgtattaatgccaaccaagtaatcgttaacaatctggataaatcagctggtttcccatttaataaatggggtaaggctagactttattatgactcaatgagttatgaggatcaagatgcacttttcgcgtatactaagcgtaatgtcatccctactataactcaaatgaatcttaagtatgccattagtgcaaagaatagagctcgcaccgtagctggtgtctctatctgtagtactatgacaaatagacagtttcatcagaaattattgaagtcaatagccgccactagaggagctactgtggtaattggaacaagcaagttttacggtggctggcataatatgttaaaaactgtttacagtgatgtagaaactccacaccttatgggttgggattatccaaaatgtgacagagccatgcctaacatgcttaggataatggcctctcttgttcttgctcgcaaacataacacttgctgtaacttatcacaccgtttctacaggttagctaacgagtgtgcgcaagtattaagtgagatggtcatgtgtggcggctcactatatgttaaaccaggtggaacatcatccggtgatgctacaactgcttatgctaatagtgtctttaacatttgtcaagctgttacagccaatgtaaatgcacttctttcaactgatggtaataagatagctgacaagtatgtccgcaatctacaacacaggctctatgagtgtctctatagaaatagggatgttgatcatgaattcgtggatgagttttacgcttacctgcgtaaacatttctccatgatgattctttctgatgatgccgttgtgtgctataacagtaactatgcggctcaaggtttagtagctagcattaagaactttaaggcagttctttattatcaaaataatgtgttcatgtctgaggcaaaatgttggactgagactgaccttactaaaggacctcacgaattttgctcacagcatacaatgctagttaaacaaggagatgattacgtgtacctgccttacccagatccatcaagaatattaggcgcaggctgttttgtcgatgatattgtcaaaacagatggtacacttatgattgaaaggttcgtgtcactggctattgatgcttacccacttacaaaacatcctaatcaggagtatgctgatgtctttcacttgtatttacaatacattagaaagttacatgatgagcttactggccacatgttggacatgtattccgtaatgctaactaatgataacacctcacggtactgggaacctgagttttatgaggctatgtacacaccacatacagtcttgcaggctgtaggtgcttgtgtattgtgcaattcacagacttcacttcgttgcggtgcctgtattaggagaccattcctatgttgcaagtgctgctatgaccatgtcatttcaacatcacacaaattagtgttgtctgttaatccctatgtttgcaatgccccaggttgtgatgtcactgatgtgacacaactgtatctaggaggtatgagctattattgcaagtcacataagcctcccattagttttccattatgtgctaatggtcaggtttttggtttatacaaaaacacatgtgtaggcagtgacaatgtcactgacttcaatgcgatagcaacatgtgattggactaatgctggcgattacatacttgccaacacttgtactgagagactcaagcttttcgcagcagaaacgctcaaagccactgaggaaacatttaagctgtcatatggtattgccactgtacgcgaagtactctctgacagagaattgcatctttcatgggaggttggaaaacctagaccaccattgaacagaaactatgtctttactggttaccgtgtaactaaaaatagtaaagtacagattggagagtacacctttgaaaaaggtgactatggtgatgctgttgtgtacagaggtactacgacatacaagttgaatgttggtgattactttgtgttgacatctcacactgtaatgccacttagtgcacctactctagtgccacaagagcactatgtgagaattactggcttgtacccaacactcaacatctcagatgagttttctagcaatgttgcaaattatcaaaaggtcggcatgcaaaagtactctacactccaaggaccacctggtactggtaagagtcattttgccatcggacttgctctctattacccatctgctcgcatagtgtatacggcatgctctcatgcagctgttgatgccctatgtgaaaaggcattaaaatatttgcccatagataaatgtagtagaatcatacctgcgcgtgcgcgcgtagagtgttttgataaattcaaagtgaattcaacactagaacagtatgttttctgcactgtaaatgcattgccagaaacaactgctgacattgtagtctttgatgaaatctctatggctactaattatgacttgagtgttgtcaatgctagacttcgtgcaaaacactacgtctatattggcgatcctgctcaattaccagccccccgcacattgctgactaaaggcacactagaaccagaatattttaattcagtgtgcagacttatgaaaacaataggtccagacatgttccttggaacttgtcgccgttgtcctgctgaaattgttgacactgtgagtgctttagtttatgacaataagctaaaagcacacaaggataagtcagctcaatgcttcaaaatgttctacaaaggtgttattacacatgatgtttcatctgcaatcaacagacctcaaataggcgttgtaagagaatttcttacacgcaatcctgcttggagaaaagctgtttttatctcaccttataattcacagaacgctgtagcttcaaaaatcttaggattgcctacgcagactgttgattcatcacagggttctgaatatgactatgtcatattcacacaaactactgaaacagcacactcttgtaatgtcaaccgcttcaatgtggctatcacaagggcaaaaattggcattttgtgcataatgtctgatagagatctttatgacaaactgcaatttacaagtctagaaataccacgtcgcaatgtggctacattacaagcagaaaatgtaactggactttttaaggactgtagtaagatcattactggtcttcatcctacacaggcacctacacacctcagcgttgatataaagttcaagactgaaggattatgtgttgacataccaggcataccaaaggacatgacctaccgtagactcatctctatgatgggtttcaaaatgaattaccaagtcaatggttaccctaatatgtttatcacccgcgaagaagctattcgtcacgttcgtgcgtggattggctttgatgtagagggctgtcatgcaactagagatgctgtgggtactaacctacctctccagctaggattttctacaggtgttaacttagtagctgtaccgactggttatgttgacactgaaaataacacagaattcaccagagttaatgcaaaacctccaccaggtgaccagtttaaacatcttataccactcatgtataaaggcttgccctggaatgtagtgcgtattaagatagtacaaatgctcagtgatacactgaaaggattgtcagacagagtcgtgttcgtcctttgggcgcatggctttgagcttacatcaatgaagtactttgtcaagattggacctgaaagaacgtgttgtctgtgtgacaaacgtgcaacttgcttttctacttcatcagatacttatgcctgctggaatcattctgtgggttttgactatgtctataacccatttatgattgatgttcagcagtggggctttacgggtaaccttcagagtaaccatgaccaacattgccaggtacatggaaatgcacatgtggctagttgtgatgctatcatgactagatgtttagcagtccatgagtgctttgttaagcgcgttgattggtctgttgaataccctattataggagatgaactgagggttaattctgcttgcagaaaagtacaacacatggttgtgaagtctgcattgcttgctgataagtttccagttcttcatgacattggaaatccaaaggctatcaagtgtgtgcctcaggctgaagtagaatggaagttctacgatgctcagccatgtagtgacaaagcttacaaaatagaggaactcttctattcttatgctacacatcacgataaattcactgatggtgtttgtttgttttggaattgtaacgttgatcgttacccagccaatgcaattgtgtgtaggtttgacacaagagtcttgtcaaacttgaacttaccaggctgtgatggtggtagtttgtatgtgaataagcatgcattccacactccagctttcgataaaagtgcatttactaatttaaagcaattgcctttcttttactattctgatagtccttgtgagtctcatggcaaacaagtagtgtcggatattgattatgttccactcaaatctgctacgtgtattacacgatgcaatttaggtggtgctgtttgcagacaccatgcaaatgagtaccgacagtacttggatgcatataatatgatgatttctgctggatttagcctatggatttacaaacaatttgatacttataacctgtggaatacatttaccaggttacagagtttagaaaatgtggcttataatgttgttaataaaggacactttgatggacacgccggcgaagcacctgtttccatcattaataatgctgtttacacaaaggtagatggtattgatgtggagatctttgaaaataagacaacacttcctgttaatgttgcatttgagctttgggctaagcgtaacattaaaccagtgccagagattaagatactcaataatttgggtgttgatatcgctgctaatactgtaatctgggactacaaaagagaagccccagcacatgtatctacaataggtgtctgcacaatgactgacattgccaagaaacctactgagagtgcttgttcttcacttactgtcttgtttgatggtagagtggaaggacaggtagacctttttagaaacgcccgtaatggtgttttaataacagaaggttcagtcaaaggtctaacaccttcaaagggaccagcacaagctagcgtcaatggagtcacattaattggagaatcagtaaaaacacagtttaactactttaagaaagtagacggcattattcaacagttgcctgaaacctactttactcagagcagagacttagaggattttaagcccagatcacaaatggaaactgactttctcgagctcgctatggatgaattcatacagcgatataagctcgagggctatgccttcgaacacatcgtttatggagatttcagtcatggacaacttggcggtcttcatttaatgataggcttagccaagcgctcacaagattcaccacttaaattagaggattttatccctatggacagcacagtgaaaaattacttcataacagatgcgcaaacaggttcatcaaaatgtgtgtgttctgtgattgatcttttacttgatgactttgtcgagataataaagtcacaagatttgtcagtgatttcaaaagtggtcaaggttacaattgactatgctgaaatttcattcatgctttggtgtaaggatggacatgttgaaaccttctacccaaaactacaagcaagtcaagcgtggcaaccaggtgttgcgatgcctaacttgtacaagatgcaaagaatgcttcttgaaaagtgtgaccttcagaattatggtgaaaatgctgttataccaaaaggaataatgatgaatgtcgcaaagtatactcaactgtgtcaatacttaaatacacttactttagctgtaccctacaacatgagagttattcactttggtgctggctctgataaaggagttgcaccaggtacagctgtgctcagacaatggttgccaactggcacactacttgtcgattcagatcttaatgacttcgtctccgacgcagattctactttaattggagactgtgcaacagtacatacggctaataaatgggaccttattattagcgatatgtatgaccctaggaccaaacatgtgacaaaagagaatgactctaaagaagggtttttcacttatctgtgtggatttataaagcaaaaactagccctgggtggttctatagctgtaaagataacagagcattcttggaatgctgacctttacaagcttatgggccatttctcatggtggacagcttttgttacaaatgtaaatgcatcatcatcggaagcatttttaattggggctaactatcttggcaagccgaaggaacaaattgatggctataccatgcatgctaactacattttctggaggaacacaaatcctatccagttgtcttcctattcactctttgacatgagcaaatttcctcttaaattaagaggaactgctgtaatgtctcttaaggagaatcaaatcaatgatatgatttattctcttctggaaaaaggtaggcttatcattagagaaaacaacagagttgtggtttcaagtgatattcttgttaacaactaaacgaacatgtttattttcttattatttcttactctcactagtggtagtgaccttgaccggtgcaccacttttgatgatgttcaagctcctaattacactcaacatacttcatctatgaggggggtttactatcctgatgaaatttttagatcagacactctttatttaactcaggatttatttcttccattttattctaatgttacagggtttcatactattaatcatacgtttggcaaccctgtcataccttttaaggatggtatttattttgctgccacagagaaatcaaatgttgtccgtggttgggtttttggttctaccatgaacaacaagtcacagtcggtgattattattaacaattctactaatgttgttatacgagcatgtaactttgaattgtgtgacaaccctttctttgctgtttctaaacccatgggtacacagacacatactatgatattcgataatgcatttaattgcactttcgagtacatatctgatgccttttcgcttgatgtttcagaaaagtcaggtaattttaaacacttacgagagtttgtgtttaaaaataaagatgggtttctctatgtttataagggctatcaacctatagatgtagttcgtgatctaccttctggttttaacactttgaaacctatttttaagttgcctcttggtattaacattacaaattttagagccattcttacagccttttcacctgctcaagacatttggggcacgtcagctgcagcctattttgttggctatttaaagccaactacatttatgctcaagtatgatgaaaatggtacaatcacagatgctgttgattgttctcaaaatccacttgctgaactcaaatgctctgttaagagctttgagattgacaaaggaatttaccagacctctaatttcagggttgttccctcaggagatgttgtgagattccctaatattacaaacttgtgtccttttggagaggtttttaatgctactaaattcccttctgtctatgcatgggagagaaaaaaaatttctaattgtgttgctgattactctgtgctctacaactcaacatttttttcaacctttaagtgctatggcgtttctgccactaagttgaatgatctttgcttctccaatgtctatgcagattcttttgtagtcaagggagatgatgtaagacaaatagcgccaggacaaactggtgttattgctgattataattataaattgccagatgatttcatgggttgtgtccttgcttggaatactaggaacattgatgctacttcaactggtaattataattataaatataggtatcttagacatggcaagcttaggccctttgagagagacatatctaatgtgcctttctcccctgatggcaaaccttgcaccccacctgctcttaattgttattggccattaaatgattatggtttttacaccactactggcattggctaccaaccttacagagttgtagtactttcttttgaacttttaaatgcaccggccacggtttgtggaccaaaattatccactgaccttattaagaaccagtgtgtcaattttaattttaatggactcactggtactggtgtgttaactccttcttcaaagagatttcaaccatttcaacaatttggccgtgatgtttctgatttcactgattccgttcgagatcctaaaacatctgaaatattagacatttcaccttgctcttttgggggtgtaagtgtaattacacctggaacaaatgcttcatctgaagttgctgttctatatcaagatgttaactgcactgatgtttctacagcaattcatgcagatcaactcacaccagcttggcgcatatattctactggaaacaatgtattccagactcaagcaggctgtcttataggagctgagcatgtcgacacttcttatgagtgcgacattcctattggagctggcatttgtgctagttaccatacagtttctttattacgtagtactagccaaaaatctattgtggcttatactatgtctttaggtgctgatagttcaattgcttactctaataacaccattgctatacctactaacttttcaattagcattactacagaagtaatgcctgtttctatggctaaaacctccgtagattgtaatatgtacatctgcggagattctactgaatgtgctaatttgcttctccaatatggtagcttttgcacacaactaaatcgtgcactctcaggtattgctgctgaacaggatcgcaacacacgtgaagtgttcgctcaagtcaaacaaatgtacaaaaccccaactttgaaatattttggtggttttaatttttcacaaatattacctgaccctctaaagccaactaagaggtcttttattgaggacttgctctttaataaggtgacactcgctgatgctggcttcatgaagcaatatggcgaatgcctaggtgatattaatgctagagatctcatttgtgcgcagaagttcaatggacttacagtgttgccacctctgctcactgatgatatgattgctgcctacactgctgctctagttagtggtactgccactgctggatggacatttggtgctggcgctgctcttcaaataccttttgctatgcaaatggcatataggttcaatggcattggagttacccaaaatgttctctatgagaaccaaaaacaaatcgccaaccaatttaacaaggcgattagtcaaattcaagaatcacttacaacaacatcaactgcattgggcaagctgcaagacgttgttaaccagaatgctcaagcattaaacacacttgttaaacaacttagctctaattttggtgcaatttcaagtgtgctaaatgatatcctttcgcgacttgataaagtcgaggcggaggtacaaattgacaggttaattacaggcagacttcaaagccttcaaacctatgtaacacaacaactaatcagggctgctgaaatcagggcttctgctaatcttgctgctactaaaatgtctgagtgtgttcttggacaatcaaaaagagttgacttttgtggaaagggctaccaccttatgtccttcccacaagcagccccgcatggtgttgtcttcctacatgtcacgtatgtgccatcccaggagaggaacttcaccacagcgccagcaatttgtcatgaaggcaaagcatacttccctcgtgaaggtgtttttgtgtttaatggcacttcttggtttattacacagaggaacttcttttctccacaaataattactacagacaatacatttgtctcaggaaattgtgatgtcgttattggcatcattaacaacacagtttatgatcctctgcaacctgagcttgactcattcaaagaagagctggacaagtacttcaaaaatcatacatcaccagatgttgatcttggcgacatttcaggcattaacgcttctgtcgtcaacattcaaaaagaaattgaccgcctcaatgaggtcgctaaaaatttaaatgaatcactcattgaccttcaagaattgggaaaatatgagcaatatattaaatggccttggtatgtttggctcggcttcattgctggactaattgccatcgtcatggttacaatcttgctttgttgcatgactagttgttgcagttgcctcaagggtgcatgctcttgtggttcttgctgcaagtttgatgaggatgactctgagccagttctcaagggtgtcaaattacattacacataaacgaacttatggatttgtttatgagattttttactcttggatcaattactgcacagccagtaaaaattgacaatgcttctcctgcaagtactgttcatgctacagcaacgataccgctacaagcctcactccctttcggatggcttgttattggcgttgcatttcttgctgtttttcagagcgctaccaaaataattgcgctcaataaaagatggcagctagccctttataagggcttccagttcatttgcaatttactgctgctatttgttaccatctattcacatcttttgcttgtcgctgcaggtatggaggcgcaatttttgtacctctatgccttgatatattttctacaatgcatcaacgcatgtagaattattatgagatgttggctttgttggaagtgcaaatccaagaacccattactttatgatgccaactactttgtttgctggcacacacataactatgactactgtataccatataacagtgtcacagatacaattgtcgttactgaaggtgacggcatttcaacaccaaaactcaaagaagactaccaaattggtggttattctgaggataggcactcaggtgttaaagactatgtcgttgtacatggctatttcaccgaagtttactaccagcttgagtctacacaaattactacagacactggtattgaaaatgctacattcttcatctttaacaagcttgttaaagacccaccgaatgtgcaaatacacacaatcgacggctcttcaggagttgctaatccagcaatggatccaatttatgatgagccgacgacgactactagcgtgcctttgtaagcacaagaaagtgagtacgaacttatgtactcattcgtttcggaagaaacaggtacgttaatagttaatagcgtacttctttttcttgctttcgtggtattcttgctagtcacactagccatccttactgcgcttcgattgtgtgcgtactgctgcaatattgttaacgtgagtttagtaaaaccaacggtttacgtctactcgcgtgttaaaaatctgaactcttctgaaggagttcctgatcttctggtctaaacgaactaactattattattattctgtttggaactttaacattgcttatcatggcagacaacggtactattaccgttgaggagcttaaacaactcctggaacaatggaacctagtaataggtttcctatgcctagcctggattatgttactacaatttgcctattctaatcggaacaggtttttgtacataataaagcttgttttcctctggctcttgtggccagtaacacttgcttgttttgtgcttgctgctgtctacagaattaattgggtgactggcgggattgcgattgcaatggcttgtattgtaggcttgatgtggcttagctacttcgttgcttccttcaggctgtttgctcgtacccgctcaatgtggtcattcaacccagaaacaaacattcttctcaatgtgcctctccgggggacaattgtgaccagaccgctcatggaaagtgaacttgtcattggtgctgtgatcattcgtggtcacttgcgaatggccggacactccctagggcgctgtgacattaaggacctgccaaaagagatcactgtggctacatcacgaacgctttcttattacaaattaggagcgtcgcagcgtgtaggcactgattcaggttttgctgcatacaaccgctaccgtattggaaactataaattaaatacagaccacgccggtagcaacgacaatattgctttgctagtacagtaagtgacaacagatgtttcatcttgttgacttccaggttacaatagcagagatattgattatcattatgaggactttcaggattgctatttggaatcttgacgttataataagttcaatagtgagacaattatttaagcctctaactaagaagaattattcggagttagatgatgaagaacctatggagttagattatccataaaacgaacatgaaaattattctcttcctgacattgattgtatttacatcttgcgagctatatcactatcaggagtgtgttagaggtacgactgtactactaaaagaaccttgcccatcaggaacatacgagggcaattcaccatttcaccctcttgctgacaataaatttgcactaacttgcactagcacacactttgcttttgcttgtgctgacggtactcgacatacctatcagctgcgtgcaagatcagtttcaccaaaacttttcatcagacaagaggaggttcaacaagagctctactcgccactttttctcattgttgctgctctagtatttttaatactttgcttcaccattaagagaaagacagaatgaatgagctcactttaattgacttctatttgtgctttttagcctttctgctattccttgttttaataatgcttattatattttggttttcactcgaaatccaggatctagaagaaccttgtaccaaagtctaaacgaacatgaaacttctcattgttttgacttgtatttctctatgcagttgcatatgcactgtagtacagcgctgtgcatctaataaacctcatgtgcttgaagatccttgtaaggtacaacactaggggtaatacttatagcactgcttggctttgtgctctaggaaaggttttaccttttcatagatggcacactatggttcaaacatgcacacctaatgttactatcaactgtcaagatccagctggtggtgcgcttatagctaggtgttggtaccttcatgaaggtcaccaaactgctgcatttagagacgtacttgttgttttaaataaacgaacaaattaaaatgtctgataatggaccccaatcaaaccaacgtagtgccccccgcattacatttggtggacccacagattcaactgacaataaccagaatggaggacgcaatggggcaaggccaaaacagcgccgaccccaaggtttacccaataatactgcgtcttggttcacagctctcactcagcatggcaaggaggaacttagattccctcgaggccagggcgttccaatcaacaccaatagtggtccagatgaccaaattggctactaccgaagagctacccgacgagttcgtggtggtgacggcaaaatgaaagagctcagccccagatggtacttctattacctaggaactggcccagaagcttcacttccctacggcgctaacaaagaaggcatcgtatgggttgcaactgagggagccttgaatacacccaaagaccacattggcacccgcaatcctaataacaatgctgccaccgtgctacaacttcctcaaggaacaacattgccaaaaggcttctacgcagagggaagcagaggcggcagtcaagcctcttctcgctcctcatcacgtagtcgcggtaattcaagaaattcaactcctggcagcagtaggggaaattctcctgctcgaatggctagcggaggtggtgaaactgccctcgcgctattgctgctagacagattgaaccagcttgagagcaaagtttctggtaaaggccaacaacaacaaggccaaactgtcactaagaaatctgctgctgaggcatctaaaaagcctcgccaaaaacgtactgccacaaaacagtacaacgtcactcaagcatttgggagacgtggtccagaacaaacccaaggaaatttcggggaccaagacctaatcagacaaggaactgattacaaacattggccgcaaattgcacaatttgctccaagtgcctctgcattctttggaatgtcacgcattggcatggaagtcacaccttcgggaacatggctgacttatcatggagccattaaattggatgacaaagatccacaattcaaagacaacgtcatactgctgaacaagcacattgacgcatacaaaacattcccaccaacagagcctaaaaaggacaaaaagaaaaagactgatgaagctcagcctttgccgcagagacaaaagaagcagcccactgtgactcttcttcctgcggctgacatggatgatttctccagacaacttcaaaattccatgagtggagcttctgctgattcaactcaggcataaacactcatgatgaccacacaaggcagatgggctatgtaaacgttttcgcaattccgtttacgatacatagtctactcttgtgcagaatgaattctcgtaactaaacagcacaagtaggtttagttaactttaatctcacatagcaatctttaatcaatgtgtaacattagggaggacttgaaagagccaccacattttcatcgaggccacgcggagtacgatcgagggtacagtgaataatgctagggagagctgcctatatggaagagccctaatgtgtaaaattaattttagtagtgctatccccatgtgattttaatagcttcttaggagaatgac

SEQ ID NO: 29814 - DNA, 29735 bp, SARS Coronavirus
cccgggatattaggtttttacctacccaggaaaagccaaccaacctcgatctcttgtagatctgttctctaaacgaactttaaaatctgtgtagctgtcgctcggctgcatgcctagtgcacctacgcagtataaacaataataaattttactgtcgttgacaagaaacgagtaactcgtccctcttctgcagactgcttacggtttcgtccgtgttgcagtcgatcatcagcatacctaggtttcgtccgggtgtgaccgaaaggtaagatggagagccttgttcttggtgtcaacgagaaaacacacgtccaactcagtttgcctgtccttcaggttagagacgtgctagtgcgtggcttcgggaactctgtggaagaggccctatcggaggcacgtgaacacctcaaaaatggcacttgtggtctagtagagctggaaaaaggcgtactgccccagcttgaacagccctatgtgttcattaaacgttctgatgccttaagcaccaatcacggccacaaggtcgttgagctggttgcagaaatggacggcattcagtacggtcgtagcggtataacactgggagtactcgtgccacatgtgggcgaaaccccaattgcataccgcaatgttcttcttcgtaagaacggtaataagggagccggtggtcatagctatggcatcgatctaaagtcttatgacttaggtgacgagcttggcactgatcccattgaagattatgaacaaaactggaacactaagcatggcagtggtgcactccgtgaactcactcgtgagctcaatggaggtgcagtcactcgctatgtcgacaacaatttctgtggcccagatgggtaccctcttgattgcatcaaagattttctcgcacgcgcgggcaagtcaatgtgcactctttccgaacaacttgattacatcgagtcgaagagaggtgtctactgctgccgtgaccatgagcatgaaattgcctggttcactgagcgctctgataagagctacgagcaccagacacccttcgaaattaagagtgccaagaaatttgacactttcaaaggggaatgcccaaagtttgtgtttcctcttaactcaaaagtcaaagtcattcaaccacgtgttgaaaagaaaaagactgagggtttcatggggcgtatacgctctgtgtaccctgttgcatctccacaggagtgtaacaatatgcacttgtctaccttgatgaaatgtaatcattgcgatgaagtttcatggcagacgtgcgactttctgaaagccacttgtgaacattgtggcactgaaaatttagttattgaaggacctactacatgtgggtacctacctactaatgctgtagtgaaaatgccatgtcctgcctgtcaagacccagagattggacctgagcatagtgttgcagattatcacaaccactcaaacattgaaactcgactccgcaagggaggtaggactagatgttttggaggctgtgtgtttgcctatgttggctgctataataagcgtgcctactgggttcctcgtgctagtgctgatattggctcaggccatactggcattactggtgacaatgtggagaccttgaatgaggatctccttgagatactgagtcgtgaacgtgttaacattaacattgttggcgattttcatttgaatagagaggttgccatcattttggcatctttctctgcttctacaagtgcctttattgacactataaagagtcttgattacaagtctttcaaaaccattgttgagtcctgcggtaactataaagttaccaagggaaagcccgtaaaaggtgcttggaacattggacaacagagatcagttttaacaccactgtgtggttttccctcacaggctgctggtgttatcagatcaatttttgcgcgcacacttgatgcagcaaaccactcaattcctgatttgcaaagagcagctgtcaccatacttgatggtatttctgaacagtcattacgtcttgtcgacgccatggtttatacttcagacctgctcaccaacagtgtcattattatggcatatgtaactggtggtcttgtacaacagacttctcagtggttgtctaatcttttgggcactactgttgaaaaactcaggcctatctttgaatggattgaggcgaaacttagtgcaggagttgaatttctcaaggatgcttgggagattctcaaatttctcattacaggtgtttttgacatcgtcaagggtcaaatacaggttgcttcagataacatcaaggattgtgtaaaatgcttcattgatgttgttaacaaggcactcgaaatgtgcattgatcaagtcactatcgctggcgcaaagttgcgatcactcaacttaggtgaagtcttcatcgctcaaagcaagggactttaccgtcagtgtatacgtggcaaggagcagctgcaactactcatgcctcttaaggcaccaaaagaagtaacctttcttgaaggtgattcacatgacacagtacttacctctgaggaggttgttctcaagaacggtgaactcgaagcactcgagacgcccgttgatagcttcacaaatggagctatcgttggcacaccagtctgtgtaaatggcctcatgctcttagagattaaggacaaagaacaatactgcgcattgtctcctggtttactggctacaaacaatgtctttcgcttaaaagggggtgcaccaattaaaggtgtaacctttggagaagatactgtttgggaagttcaaggttacaagaatgtgagaatcacatttgagcttgatgaacgtgttgacaaagtgcttaatgaaaagtgctctgtctacactgttgaatccggtaccgaagttactgagtttgcatgtgttgtagcagaggctgttgtgaagactttacaaccagtttctgatctccttaccaacatgggtattgatcttgatgagtggagtgtagctacattctacttatttgatgatgctggtgaagaaaacttttcatcacgtatgtattgttccttttaccctccagatgaggaagaagaggacgatgcagagtgtgaggaagaagaaattgatgaaacctgtgaacatgagtacggtacagaggatgattatcaaggtctccctctggaatttggtgcctcagctgaaacagttcgagttgaggaagaagaagaggaagactggctggatgatactactgagcaatcagagattgagccagaaccagaacctacacctgaagaaccagttaatcagtttactggttatttaaaacttactgacaatgttgccattaaatgtgttgacatcgttaaggaggcacaaagtgctaatcctatggtgattgtaaatgctgctaacatacacctgaaacatggtggtggtgtagcaggtgcactcaacaaggcaaccaatggtgccatgcaaaaggagagtgatgattacattaagctaaatggccctcttacagcaggagggtcttgtttgctttctggacataatcttgctaagaagtgtctgcatgttgttggacctaacctaaatgcaggtgaggacatccagcttcttaaggcagcatatgaaaatttcaattcacaggacatcttacttgcaccattgttgtcagcaggcatatttggtgctaaaccacttcagtctttacaagtgtgcgtgcagacggttcgtacacaggtttatattgcagtcaatgacaaagctctttatgagcaggttgtcatggattatcttgataacctgaagcctagagtggaagcacctaaacaagaggagccaccaaacacagaagattccaaaactgaggagaaatctgtcgtacagaagcctgtcgatgtgaagccaaaaattaaggcctgcattgatgaggttaccacaacactggaagaaactaagtttcttaccaataagttactcttgtttgctgatatcaatggtaagctttaccatgattctcagaacatgcttagaggtgaagatatgtctttccttgagaaggatgcaccttacatggtaggtgatgttatcactagtggtgatatcacttgtgttgtaataccctccaaaaaggctggtggcactactgagatgctctcaagagctttgaagaaagtgccaattgatgagtatataaccacgtaccctggacaaggatgtgctggttatacacttgaggaagctaagactgctcttaagaaatgcaaatctgcattttatgtactaccttcagaagcacctaatgctaaggaagagattctaggaactgtatcctggaatttgagagaaatgcttgctcatgctgaagagacaagaaaattaatgcctatatgcatggatgttagagccataatggcaaccatccaacgtaagtataaaggaattaaaattcaagagggcatcgttgactatggtgtccgattcttcttttatactagtaaagagcctgtagcttctattattacgaagctgaactctctaaatgagccgcttgtcacaatgccaattggttatgtgacacatggttttaatcttgaagaggctgcgcgctgtatgcgttctcttaaagctcctgccgtagtgtcagtatcatcaccagatgctgttactacatataatggatacctcacttcgtcatcaaagacatctgaggagcactttgtagaaacagtttctttggctggctcttacagagattggtcctattcaggacagcgtacagagttaggtgttgaatttcttaagcgtggtgacaaaattgtgtaccacactctggagagccccgtcgagtttcatcttgacggtgaggttctttcacttgacaaactaaagagtctcttatccctgcgggaggttaagactataaaagtgttcacaactgtggacaacactaatctccacacacagcttgtggatatgtctatgacatatggacagcagtttggtccaacatacttggatggtgctgatgttacaaaaattaaacctcatgtaaatcatgagggtaagactttctttgtactacctagtgatgacacactacgtagtgaagctttcgagtactaccatactcttgatgagagttttcttggtaggtacatgtctgctttaaaccacacaaagaaatggaaatttcctcaagttggtggtttaacttcaattaaatgggctgataacaattgttatttgtctagtgttttattagcacttcaacagcttgaagtcaaattcaatgcaccagcacttcaagaggcttattatagagcccgtgctggtgatgctgctaacttttgtgcactcatactcgcttacagtaataaaactgttggcgagcttggtgatgtcagagaaactatgacccatcttctacagcatgctaatttggaatctgcaaagcgagttcttaatgtggtgtgtaaacattgtggtcagaaaactactaccttaacgggtgtagaagctgtgatgtatatgggtactctatcttatgataatcttaagacaggtgtttccattccatgtgtgtgtggtcgtgatgctacacaatatctagtacaacaagagtcttcttttgttatgatgtctgcaccacctgctgagtataaattacagcaaggtacattcttatgtgcgaatgagtacactggtaactatcagtgtggtcattacactcatataactgctaaggagaccctctatcgtattgacggagctcaccttacaaagatgtcagagtacaaaggaccagtgactgatgttttctacaaggaaacatcttacactacaaccatcaagcctgtgtcgtataaactcgatggagttacttacacagagattgaaccaaaattggatgggtattataaaaaggataatgcttactatacagagcagcctatagaccttgtaccaactcaaccattaccaaatgcgagttttgataatttcaaactcacatgttctaacacaaaatttgctgatgatttaaatcaaatgacaggcttcacaaagccagcttcacgagagctatctgtcacattcttcccagacttgaatggcgatgtagtggctattgactatagacactattcagcgagtttcaagaaaggtgctaaattactgcataagccaattgtttggcacattaaccaggctacaaccaagacaacgttcaaaccaaacacttggtgtttacgttgtctttggagtacaaagccagtagatacttcaaattcatttgaagttctggcagtagaagacacacaaggaatggacaatcttgcttgtgaaagtcaacaacccacctctgaagaagtagtggaaaatcctaccatacagaaggaagtcatagagtgtgacgtgaaaactaccgaagttgtaggcaatgtcatacttaaaccatcagatgaaggtgttaaagtaacacaagagttaggtcatgaggatcttatggctgcttatgtggaaaacacaagcattaccattaagaaacctaatgagctttcactagccttaggtttaaaaacaattgccactcatggtattgctgcaattaatagtgttccttggagtaaaattttggcttatgtcaaaccattcttaggacaagcagcaattacaacatcaaattgcgctaagagattagcacaacgtgtgtttaacaattatatgccttatgtgtttacattattgttccaattgtgtacttttactaaaagtaccaattctagaattagagcttcactacctacaactattgctaaaaatagtgttaagagtgttgctaaattatgtttggatgccggcattaattatgtgaagtcacccaaattttctaaattgttcacaatcgctatgtggctattgttgttaagtatttgcttaggttctctaatctgtgtaactgctgcttttggtgtactcttatctaattttggtgctccttcttattgtaatggcgttagagaattgtatcttaattcgtctaacgttactactatggatttctgtgaaggttcttttccttgcagcatttgtttaagtggattagactcccttgattcttatccagctcttgaaaccattcaggtgacgatttcatcgtacaagctagacttgacaattttaggtctggccgctgagtgggttttggcatatatgttgttcacaaaattcttttatttattaggtctttcagctataatgcaggtgttctttggctattttgctagtcatttcatcagcaattcttggctcatgtggtttatcattagtattgtacaaatggcacccgtttctgcaatggttaggatgtacatcttctttgcttctttctactacatatggaagagctatgttcatatcatggatggttgcacctcttcgacttgcatgatgtgctataagcgcaatcgtgccacacgcgttgagtgtacaactattgttaatggcatgaagagatctttctatgtctatgcaaatggaggccgtggcttctgcaagactcacaattggaattgtctcaattgtgacacattttgcactggtagtacattcattagtgatgaagttgctcgtgatttgtcactccagtttaaaagaccaatcaaccctactgaccagtcatcgtatattgttgatagtgttgctgtgaaaaatggcgcgcttcacctctactttgacaaggctggtcaaaagacctatgagagacatccgctctcccattttgtcaatttagacaatttgagagctaacaacactaaaggttcactgcctattaatgtcatagtttttgatggcaagtccaaatgcgacgagtctgcttctaagtctgcttctgtgtactacagtcagctgatgtgccaacctattctgttgcttgaccaagctcttgtatcagacgttggagatagtactgaagtttccgttaagatgtttgatgcttatgtcgacaccttttcagcaacttttagtgttcctatggaaaaacttaaggcacttgttgctacagctcacagcgagttagcaaagggtgtagctttagatggtgtcctttctacattcgtgtcagctgcccgacaaggtgttgttgataccgatgttgacacaaaggatgttattgaatgtctcaaactttcacatcactctgacttagaagtgacaggtgacagttgtaacaatttcatgctcacctataataaggttgaaaacatgacgcccagagatcttggcgcatgtattgactgtaatgcaaggcatatcaatgcccaagtagcaaaaagtcacaatgtttcactcatctggaatgtaaaagactacatgtctttatctgaacagctgcgtaaacaaattcgtagtgctgccaagaagaacaacataccttttagactaacttgtgctacaactagacaggttgtcaatgtcataactactaaaatctcactcaagggtggtaagattgttagtacttgttttaaacttatgcttaaggccacattattgtgcgttcttgctgcattggtttgttatatcgttatgccagtacatacattgtcaatccatgatggttacacaaatgaaatcattggttacaaagccattcaggatggtgtcactcgtgacatcatttctactgatgattgttttgcaaataaacatgctggttttgacgcatggtttagccagcgtggtggttcatacaaaaatgacaaaagctgccctgtagtagctgctatcattacaagagagattggtttcatagtgcctggcttaccgggtactgtgctgagagcaatcaatggtgacttcttgcattttctacctcgtgtttttagtgctgttggcaacatttgctacacaccttccaaactcattgagtatagtgattttgctacctctgcttgcgttcttgctgctgagtgtacaatttttaaggatgctatgggcaaacctgtgccatattgttatgacactaatttgctagagggttctatttcttatagtgagcttcgtccagacactcgttatgtgcttatggatggttccatcatacagtttcctaacacttacctggagggttctgttagagtagtaacaacttttgatgctgagtactgtagacatggtacatgcgaaaggtcagaagtaggtatttgcctatctaccagtggtagatgggttcttaataatgagcattacagagctctatcaggagttttctgtggtgttgatgcgatgaatctcatagctaacatctttactcctcttgtgcaacctgtgggtgctttagatgtgtctgcttcagtagtggctggtggtattattgccatattggtgacttgtgctgcctactactttatgaaattcagacgtgtttttggtgagtacaaccatgttgttgctgctaatgcacttttgtttttgatgtctttcactatactctgtctggtaccagcttacagctttctgccgggagtctactcagtcttttacttgtacttgacattctatttcaccaatgatgtttcattcttggctcaccttcaatggtttgccatgttttctcctattgtgcctttttggataacagcaatctatgtattctgtatttctctgaagcactgccattggttctttaacaactatcttaggaaaagagtcatgtttaatggagttacatttagtaccttcgaggaggctgctttgtgtacctttttgctcaacaaggaaatgtacctaaaattgcgtagcgagacactgttgccacttacacagtataacaggtatcttgctctatataacaagtacaagtatttcagtggagccttagatactaccagctatcgtgaagcagcttgctgccacttagcaaaggctctaaatgactttagcaactcaggtgctgatgttctctaccaaccaccacagacatcaatcacttctgctgttctgcagagtggttttaggaaaatggcattcccgtcaggcaaagttgaagggtgcatggtacaagtaacctgtggaactacaactcttaatggattgtggttggatgacacagtatactgtccaagacatgtcatttgcacagcagaagacatgcttaatcctaactatgaagatctgctcattcgcaaatccaaccatagctttcttgttcaggctggcaatgttcaacttcgtgttattggccattctatgcaaaattgtctgcttaggcttaaagttgatacttctaaccctaagacacccaagtataaatttgtccgtatccaacctggtcaaacattttcagttctagcatgctacaatggttcaccatctggtgtttatcagtgtgccatgagacctaatcataccattaaaggttctttccttaatggatcatgtggtagtgttggttttaacattgattatgattgcgtgtctttctgctatatgcatcatatggagcttccaacaggagtacacgctggtactgacttagaaggtaaattctatggtccatttgttgacagacaaactgcacaggctgcaggtacagacacaaccataacattaaatgttttggcatggctgtatgctgctgttatcaatggtgataggtggtttcttaatagattcaccactactttgaatgactttaaccttgtggcaatgaagtacaactatgaacctttgacacaagatcatgttgacatattgggacctctttctgctcaaacaggaattgccgtcttagatatgtgtgctgctttgaaagagctgctgcagaatggtatgaatggtcgtactatccttggtagcactattttagaagatgagtttacaccatttgatgttgttagacaatgctctggtgttaccttccaaggtaagttcaagaaaattgttaagggcactcatcattggatgcttttaactttcttgacatcactattgattcttgttcaaagtacacagtggtcactgtttttctttgtttacgagaatgctttcttgccatttactcttggtattatggcaattgctgcatgtgctatgctgcttgttaagcataagcacgcattcttgtgcttgtttctgttaccttctcttgcaacagttgcttactttaatatggtctacatgcctgctagctgggtgatgcgtatcatgacatggcttgaattggctgacactagcttgtctggttataggcttaaggattgtgttatgtatgcttcagctttagttttgcttattctcatgacagctcgcactgtttatgatgatgctgctagacgtgtttggacactgatgaatgtcattacacttgtttacaaagtctactatggtaatgctttagatcaagctatttccatgtgggccttagttatttctgtaacctctaactattctggtgtcgttacgactatcatgtttttagctagagctatagtgtttgtgtgtgttgagtattacccattgttatttattactggcaacaccttacagtgtatcatgcttgtttattgtttcttaggctattgttgctgctgctactttggccttttctgtttactcaaccgttacttcaggcttactcttggtgtttatgactacttggtctctacacaagaatttaggtatatgaactcccaggggcttttgcctcctaagagtagtattgatgctttcaagcttaacattaagttgttgggtattggaggtaaaccatgtatcaaggttgctactgtacagtctaaaatgtctgacgtaaagtgcacatctgtggtactgctctcggttcttcaacaacttagagtagagtcatcttctaaattgtgggcacaatgtgtacaactccacaatgatattcttcttgcaaaagacacaactgaagctttcgagaagatggtttctcttttgtctgttttgctatccatgcagggtgctgtagacattaataggttgtgcgaggaaatgctcgataaccgtgctactcttcaggctattgcttcagaatttagttctttaccatcatatgccgcttatgccactgcccaggaggcctatgagcaggctgtagctaatggtgattctgaagtcgttctcaaaaagttaaagaaatctttgaatgtggctaaatctgagtttgaccgtgatgctgccatgcaacgcaagttggaaaagatggcagatcaggctatgacccaaatgtacaaacaggcaagatctgaggacaagagggcaaaagtaactagtgctatgcaaacaatgctcttcactatgcttaggaagcttgataatgatgcacttaacaacattatcaacaatgcgcgtgatggttgtgttccactcaacatcataccattgactacagcagccaaactcatggttgttgtccctgattatggtacctacaagaacacttgtgatggtaacacctttacatatgcatctgcactctgggaaatccagcaagttgttgatgcggatagcaagattgttcaacttagtgaaattaacatggacaattcaccaaatttggcttggcctcttattgttacagctctaagagccaactcagctgttaaactacagaataatgaactgagtccagtagcactacgacagatgtcctgtgcggctggtaccacacaaacagcttgtactgatgacaatgcacttgcctactataacaattcgaagggaggtaggtttgtgctggcattactatcagaccaccaagatctcaaatgggctagattccctaagagtgatggtacaggtacaatttacacagaactggaaccaccttgtaggtttgttacagacacaccaaaagggcctaaagtgaaatacttgtacttcatcaaaggcttaaacaacctaaatagaggtatggtgctgggcagtttagctgctacagtacgtcttcaggctggaaatgctacagaagtacctgccaattcaactgtgctttccttctgtgcttttgcagtagaccctgctaaagcatataaggattacctagcaagtggaggacaaccaatcaccaactgtgtgaagatgttgtgtacacacactggtacaggacaggcaattactgtaacaccagaagctaacatggaccaagagtcctttggtggtgcttcatgttgtctgtattgtagatgccacattgaccatccaaatcctaaaggattctgtgacttgaaaggtaagtacgtccaaatacctaccacttgtgctaatgacccagtgggttttacacttagaaacacagtctgtaccgtctgcggaatgtggaaaggttatggctgtagttgtgaccaactccgcgaacccttgatgcagtctgcggatgcatcaacgtttttaaacgggtttgcggtgtaagtgcagcccgtcttacaccgtgcggcacaggcactagtactgatgtcgtctacagggcttttgatatttacaacgaaaaagttgctggttttgcaaagttcctaaaaactaattgctgtcgcttccaggagaaggatgaggaaggcaatttattagactcttactttgtagttaagaggcatactatgtctaactaccaacatgaagagactatttataacttggttaaagattgtccagcggttgctgtccatgactttttcaagtttagagtagatggtgacatggtaccacatatatcacgtcagcgtctaactaaatacacaatggctgatttagtctatgctctacgtcattttgatgagggtaattgtgatacattaaaagaaatactcgtcacatacaattgctgtgatgatgattatttcaataagaaggattggtatgacttcgtagagaatcctgacatcttacgcgtatatgctaacttaggtgagcgtgtacgccaatcattattaaagactgtacaattctgcgatgctatgcgtgatgcaggcattgtaggcgtactgacattagataatcaggatcttaatgggaactggtacgatttcggtgatttcgtacaagtagcaccaggctgcggagttcctattgtggattcatattactcattgctgatgcccatcctcactttgactagggcattggctgctgagtcccatatggatgctgatctcgcaaaaccacttattaagtgggatttgctgaaatatgattttacggaagagagactttgtctcttcgaccgttattttaaatattgggaccagacataccatcccaattgtattaactgtttggatgataggtgtatccttcattgtgcaaactttaatgtgttattttctactgtgtttccacctacaagttttggaccactagtaagaaaaatatttgtagatggtgttccttttgttgtttcaactggataccattttcgtgagttaggagtcgtacataatcaggatgtaaacttacatagctcgcgtctcagtttcaaggaacttttagtgtatgctgctgatccagctatgcatgcagcttctggcaatttattgctagataaacgcactacatgcttttcagtagctgcactaacaaacaatgttgcttttcaaactgtcaaacccggtaattttaataaagacttttatgactttgctgtgtctaaaggtttctttaaggaaggaagttctgttgaactaaaacacttcttctttgctcaggatggcaacgctgctatcagtgattatgactattatcgttataatctgccaacaatgtgtgatatcagacaactcctattcgtagttgaagttgttgataaatactttgattgttacgatggtggctgtattaatgccaaccaagtaatcgttaacaatctggataaatcagctggtttcccatttaataaatggggtaaggctagactttattatgactcaatgagttatgaggatcaagatgcacttttcgcgtatactaagcgtaatgtcatccctactataactcaaatgaatcttaagtatgccattagtgcaaagaatagagctcgcaccgtagctggtgtctctatctgtagtactatgacaaatagacagtttcatcagaaattattgaagtcaatagccgccactagaggagctactgtggtaattggaacaagcaagttttacggtggctggcataatatgttaaaaactgtttacagtgatgtagaaactccacaccttatgggttgggattatccaaaatgtgacagagccatgcctaacatgcttaggataatggcctctcttgttcttgctcgcaaacataacacttgctgtaacttatcacaccgtttctacaggttagctaacgagtgtgcgcaagtattaagtgagatggtcatgtgtggcggctcactatatgttaaaccaggtggaacatcatccggtgatgctacaactgcttatgctaatagtgtctttaacatttgtcaagctgttacagccaatgtaaatgcacttctttcaactgatggtaataagatagctgacaagtatgtccgcaatctacaacacaggctctatgagtgtctctatagaaatagggatgttgatcatgaattcgtggatgagttttacgcttacctgcgtaaacatttctccatgatgattctttctgatgatgccgttgtgtgctataacagtaactatgcggctcaaggtttagtagctagcattaagaactttaaggcagttctttattatcaaaataatgtgttcatgtctgaggcaaaatgttggactgagactgaccttactaaaggacctcacgaattttgctcacagcatacaatgctagttaaacaaggagatgattacgtgtacctgccttacccagatccatcaagaatattaggcgcaggctgttttgtcgatgatattgtcaaaacagatggtacacttatgattgaaaggttcgtgtcactggctattgatgcttacccacttacaaaacatcctaatcaggagtatgctgatgtctttcacttgtatttacaatacattagaaagttacatgatgagcttactggccacatgttggacatgtattccgtaatgctaactaatgataacacctcacggtactgggaacctgagttttatgaggctatgtacacaccacatacagtcttgcaggctgtaggtgcttgtgtattgtgcaattcacagacttcacttcgttgcggtgcctgtattaggagaccattcctatgttgcaagtgctgctatgaccatgtcatttcaacatcacacaaattagtgttgtctgttaatccctatgtttgcaatgccccgggttgtgatgtcactgatgtgacacaactgtatctaggaggtatgagctattattgcaagtcacataagcctcccattagttttccattatgtgctaatggtcaggtttttggtttatacaaaaacacatgtgtaggcagtgacaatgtcactgacttcaatgcgatagcaacatgtgattggactaatgctggcgattacatacttgccaacacttgtactgagagactcaagcttttcgcagcagaaacgctcaaagccactgaggaaacatttaagctgtcatatggtattgccactgtacgcgaagtactctctgacagagaattgcatctttcatgggaggttggaaaacctagaccaccattgaacagaaactatgtctttactggttaccgtgtaactaaaaatagtaaagtacagattggagagtacacctttgaaaaaggtgactatggtgatgctgttgtgtacagaggtactacgacatacaagttgaatgttggtgattactttgtgttgacatctcacactgtaatgccacttagtgcacctactctagtgccacaagagcactatgtgagaattactggcttgtacccaacactcaacatctcagatgagttttctagcaatgttgcaaattatcaaaaggtcggcatgcaaaagtactctacactccaaggaccacctggtactggtaagagtcattttgccatcggacttgctctctattacccatctgctcgcatagtgtatacggcatgctctcatgcagctgttgatgccctatgtgaaaaggcattaaaatattcgcccatagataaatgtagtagaatcatacctgcgcgtgcgcgcgtagagtgttttgataaattcaaagtgaattcaacactagaacagtatgttttctgcactgtaaatgcattgccagaaacaactgctgacattgtagtctttgatgaaatctctatggctactaattatgacttgagtgttgtcaatgctagacttcgtgcaaaacactacgtctatattggcgatcctgctcaattaccagccccccgcacattgctgactaaaggcacactagaaccagaatattttaattcagtgtgcagacttatgaaaacaataggtccagacatgttccttggaacttgtcgccgttgtcctgctgaaattgttgacattgtgagtgctttagtttatgacaataagctaaaagcacacaaggataagtcagctcaatgcttcaaaatgttctacaaaggtgttattacacatgatgtttcatctgcactcaacagtcctcaaataggcgttgtaagagaatttcttacacgcaatcctgcttggagaaaagctgtttttatctcaccttataattcacagaacgctgtagcttcaaaaatcttaggattgcctacgcagactgttgattcatcacagggttctgaatatgactatgtcatattcacacaaactactgaaacagcacactcttgtaatgtcaaccgcttcaatgtggctatcacaagggcaaaaattggcattttgtgcataatgtctgatagagatctttatgacaaactgcaatttacaagtctagaaataccacgtcgcaatgtggctacattacaagcagaaaatgtaactggactttttaaggactgtagtaagatcattactggtcttcatcctacacaggcacctacacacctcagcgttgatataaagttcaagactgaaggattatgtgttgacataccaggcataccaaaggacatgacctaccgtagactcatctctatgatgggtttcaaaatgaattaccaagtcaatggttaccctaatatgtttatcacccgcgaagaagctattcgtcacgttcgtgcgtggattggctttgatgtagagggctgtcatgcaactagagatgctgtgggtactaacctacctctccagctaggattttctacaggtgttaacttagtagctgtaccgactggttatgttgacactgaaaataacacagaattcaccagagttaatgcaaaacctccaccaggtgaccagtttaaacatcttataccactcatgtataaaggcttgccctggaatgtagtgcgtattaagatagtacaaatgctcagtgatacactgaaaggattgtcagacagagtcgtgttcgtcctttgggcgcatggctttgagcttacatcaatgaagtactttgtcaagattggacctgaaagaacgtgttgtctgtgtgacaaacgtgcaacttgcttttctacttcatcagatacttatgcctgctggaatcattctgtgggttttgactatgtctataacccatttatgattgatgttcagcagtggggctttacgggtaaccttcagagtaaccatgaccaacattgccaggtacatggaaatgcacatgtggctagttgtgatgctatcatgactagatgtttagcagtccatgagtgctttgttaagcgcgttgattggtctgttgaataccctattataggagatgaactgagggttaattctgcttgcagaaaagtacaacacatggttgtgaagtctgcattgcttgctgataagtttccagttcttcatgacattggaaatccaaaggctatcaagtgtgtgcctcaggctgaagtagaatggaagttctacgatgctcagccatgtagtgacaaagcttacaaaatagaggaactcttctattcttatgctacacatcacgataaattcactgatggtgtttgtttgttttggaattgtaacgttgatcgttacccagccaatgcaattgtgtgtaggtttgacacaagagtcttgtcaaacttgaacttaccaggctgtgatggtggtagtttgtatgtgaataagcatgcattccacactccagctttcgataaaagtgcatttactaatttaaagcaattgcctttcttttactattctggtagtccttgtgagtctcatggcaaacaagtagtgtcggatattgattatgttccactcaaatctgctacgtgtattacacgatgcaatttaggtggtgctgtttgcagacaccatgcgaatgagtaccgacagtacttggatgcatataatatgatgatttctgctggatttagcctatggatttacaaacaatttgatacttataacctgtggaatacatttaccaggttacagagtttagaaaatgtggcttataatgttgttaataaaggacactttgatggacacgccggcgaagcacctgtttccatcattaataatgctgtttacacaaaggtagatggtattgatgtggagatctttgaaaataagacaacacttcctgttaatgttgcatttgagctttgggctaagcgtaacattaaaccagtgccagagattaagatactcaataatttgggtgttgatatcgctgctaatactgtaatctgggactacaaaagagaagccccagcacatgtatctacaataggtgtctgcacaatgactgacattgccaagaaacctactgagagtgcttgttcttcacttactgtcttgtttgatggtagagtggaaggacaggtagacctttttagaaacgcccgtaatggtgttttaataacagaaggttcagtcaaaggtctaacaccttcaaagggaccagcacaagctagcgtcaatggagtcacattaattggagaatcagtaaaaacacagtttaactactttaagaaagtagacggcattattcaacagttgcctgaaacctactttactcagagcagagacttagaggattttaagcccagaccacaaatggaaactgactttctcgagctcgctatggatgaattcatacagcgatataagctcgagggctatgccttcgaacacatcgtttatggagatttcagtcatggacaacttggcggtcttcatttaatgataggcttagccaagcgctcacaagattcaccacttaaattagaggattttatccctatggacagcacagtgaaaaattacttcataacagatgcgcaaacaggttcatcaaaatgtgtgtgttctgtgattgatcttttacttgatgactttgtcgagataataaagtcacaagatttgtcagtgatttcaaaagtggtcaaggttacaattgactatgctgaaatttcattcatgctttggtgtaaggatggacatgttgaaaccttctacccaaaactacaagcaagtcaagcgtggcaaccaggtgttgcgatgcctaacttgtacaagatgcaaagaatgcttcttgaaaagtgtgaccttcagaattatggtgaaaatgctgttataccaaaaggaataatgatgaatgtcgcaaagtatactcaactgtgtcaatacttaaatacacttactttagctgtaccctacaacatgagagttattcactttggtgctggctctgataaaggagttgcaccaggtacagctgtgctcagacaatggttgccaactggcacactacttgtcgattcagatcttaatgacttcgtctccgacgcagattctactttaattggagactgtgcaacagtacatacggctaataaatgggaccttattattagcgatatgtatgaccctaggaccaaacatgtgacaaaagagaatgactctaaagaagggtttttcacttatctgtgtggatttataaagcaaaaactagccctgggtggttctatagctgtaaagataacagagcattcttggaatgctgacctttacaagcttatgggccatttctcatggtggacagcttttgttacaaatgtaaatgcatcatcatcggaagcatttttaattggggctaactatcttggcaagccgaaggaacaaattgatggctataccatgcatgctaactacattttctggaggaacacaaatcctatccagttgtcttcctattcactctttgacatgagcaaatttcctcttaaattaagaggaactgctgtaatgtctcttaaggagaatcaaatcaatgatatgatttattctcttctggaaaaaggtaggcttatcattagagaaaacaacagagttgtggtttcaagtgatattcttgttaacaactaaacgaacatgtttattttcttattatttcttactctcactagtggtagtgaccttgaccggtgcaccacttttgatgatgttcaagctcctaattacactcaacatacttcatctatgaggggggtttactatcctgatgaaatttttagatcagacactctttatttaactcaggatttatttcttccattttattctaatgttacagggtttcatactattaatcatacgtttggcaaccctgtcataccttttaaggatggtatttattttgctgccacagagaaatcaaatgttgtccgtggttgggtttttggttctaccatgaacaacaagtcacagtcggtgattattattaacaattctactaatgttgttatacgagcatgtaactttgaattgtgtgacaaccctttctttgctgtttctaaacccatgggtacacagacacatactatgatattcgataatgcatttaattgcactttcgagtacatatctgatgccttttcgcttgatgtttcagaaaagtcaggtaattttaaacacttacgagagtttgtgtttaaaaataaagatgggtttctctatgtttataagggctatcaacctatagatgtagttcgtgatctaccttctggttttaacactttgaaacctatttttaagttgcctcttggtattaacattacaaattttagagccattcttacagccttttcacctgctcaagacatttggggcacgtcagctgcagcctattttgttggctatttaaagccaactacatttatgctcaagtatgatgaaaatggtacaatcacagatgctgttgattgttctcaaaatccacttgctgaactcaaatgctctgttaagagctttgagattgacaaaggaatttaccagacctctaatttcagggttgttccctcaggagatgttgtgagattccctaatattacaaacttgtgtccttttggagaggtttttaatgctactaaattcccttctgtctatgcatgggagagaaaaaaaaatttctaattgtgttgctgattactctgtgctctacaactcaacatttttttcaacctttaagtgctatggcgtttctgccactaagttgaatgatctttgcttctccaatgtctatgcagattcttttgtagtcaagggagatgatgtaagacaaatagcgccaggacaaactggtgttattgctgattataattataaattgccagatgatttcatgggttgtgtccttgcttggaatactaggaacattgatgctacttcaactggtaattataattataaatataggtatcttagacatggcaagcttaggccctttgagagagacatatctaatgtgcctttctcccctgatggcaaaccttgcaccccacctgctcttaattgttattggccattaaatgattatggtttttacaccactactggcattggctaccaaccttacagagttgtagtactttcttttgaacttttaaatgcaccggccacggtttgtggaccaaaattatccactgaccttattaagaaccagtgtgtcaattttaattttaatggactcactggtactggtgtgttaactccttcttcaaagagatttcaaccatttcaacaatttggccgtgatgtttctgatttcactgattccgttcgagatcctaaaacatctgaaatattagacatttcaccttgctcttttgggggtgtaagtgtaattacacctggaacaaatgcttcatctgaagttgctgttctatatcaagatgttaactgcactgatgtttctacagcaattcatgcagatcaactcacaccagcttggcgcatatattctactggaaacaatgtattccagactcaagcaggctgtcttataggagctgagcatgtcgacacttcttatgagtgcgacattcctattggagctggcatttgtgctagttaccatacagtttctttattacgtagtactagccaaaaatctattgtggcttatactatgtctttaggtgctgatagttcaattgcttactctaataacaccattgctatacctactaacttttcaattagcattactacagaagtaatgcctgtttctatggctaaaacctccgtagattgtaatatgtacatctgcggagattctactgaatgtgctaatttgcttctccaatatggtagcttttgcacacaactaaatcgtgcactctcaggtattgctgctgaacaggatcgcaacacacgtgaagtgttcgctcaagtcaaacaaatgtacaaaaccccaactttgaaatattttggtggttttaatttttcacaaatattacctgaccctctaaagccaactaagaggtcttttattgaggacttgctctttaataaggtgacactcgctgatgctggcttcatgaagcaatatggcgaatgcctaggtgatattaatgctagagatctcatttgtgcgcagaagttcaatggacttacagtgttgccacctctgctcactgatgatatgattgctgcctacactgctgctctagttagtggtactgccactgctggatggacatttggtgctggcgctgctcttcaaataccttttgctatgcaaatggcatataggttcaatggcattggagttacccaaaatgttctctatgagaaccaaaaacaaatcgccaaccaatttaacaaggcgattagtcaaattcaagaatcacttacaacaacatcaactgcattgggcaagctgcaagacgttgttaaccagaatgctcaagcattaaacacacttgttaaacaacttagctctaattttggtgcaatttcaagtgtgctaaatgatatcctttcgcgacttgataaagtcgaggcggaggtacaaattgacaggttaattacaggcagacttcaaagccttcaaacctatgtaacacaacaactaatcagggctgctgaaatcagggcttctgctaatcttgctgctactaaaatgtctgagtgtgttcttggacaatcaaaaagagttgacttttgtggaaagggctaccaccttatgtccttcccacaagcagccccgcatggtgttgtcttcctacatgtcacgtatgtgccatcccaggagaggaacttcaccacagcgccagcaatttgtcatgaaggcaaagcatacttccctcgtgaaggtgtttttgtgtttaatggcacttcttggtttattacacagaggaacttcttttctccacaaataattactacagacaatacatttgtctcaggaaattgtgatgtcgttattggcatcattaacaacacagtttatgatcctctgcaacctgagcttgactcattcaaagaagagctggacaagtacttcaaaaatcatacatcaccagatgttgatcttggcgacatttcaggcattaacgcttctgtcgtcaacattcaaaaagaaattgaccgcctcaatgaggtcgctaaaaatttaaatgaatcactcattgaccttcaagaattgggaaaatatgagcaatatattaaatggccttggtatgtttggctcggcttcattgctggactaattgccatcgtcatggttacaatcttgctttgttgcatgactagttgttgcagttgcctcaagggtgcatgctcttgtggttcttgctgcaagtttgatgaggatgactctgagccagttctcaagggtgtcaaattacattacacataaacgaacttatggatttgtttatgagattttttactcttggatcaattactgcacagccagtaaaaattgacaatgcttctcctgcaagtactgttcatgctacagcaacgataccgctacaagcctcactccctttcggatggcttgttattggcgttgcatttcttgctgtttttcagagcgctaccaaaataattgcgctcaataaaagatggcagctagccctttataagggcttccagttcatttgcaatttactgctgctatttgttaccatctattcacatcttttgcttgtcgctgcaggtatggaggcgcaatttttgtacctctatgccttgatatattttctacaatgcatcaacgcatgtagaattattatgagatgttggctttgttggaagtgcaaatccaagaacccattactttatgatgccaactactttgtttgctggcacacacataactatgactactgtataccatataacagtgtcacagatacaattgtcgttactgaaggtgacggcatttcaacaccaaaactcaaagaagactaccaaattggtggttattctgaggataggcactcaggtgttaaagactatgtcgttgtacatggctatttcaccgaagtttactaccagcttgagtctacacaaattactacagacactggtattgaaaatgctacattcttcatctttaacaagcttgttaaagacccaccgaatgtgcaaatacacacaatcgacggctcttcaggagttgctaatccagcaatggatccaatttatgatgagccgacgacgactactagcgtgcccttgtaagcacaagaaagtgagtacgaacttatgtactcattcgtttcggaagaaacaggtacgttaatagttaatagcgtacttctttttcttgctttcgtggtattcttgctagtcacactagccatccttactgcgcttcgattgtgtgcgtactgctgcaatattgttaacgtgagtttagtaaaaccaacggtttacgtctactcgcgtgttaaaaatctgaactcttctgaaggagttcctgatcttctggtctaaacgaactaactattattattattctgtttggaactttaacattgcttatcatggcagacaacggtactattaccgttgaggagcttaaacaactcctggaacaatggaacctagtaataggtttcctattcctagcctggattatgttactacaatttgcctattctaatcggaacaggtttttgtacataataaagcttgttttcctctggctcttgtggccagtaacacttgcttgttttgtgcttgctgttgtctacagaattaattgggtgactggcgggattgcgattgcaatggcttgtattgtaggcttgatgtggcttagctacttcgttgcttccctcaggctgtttgctcgtacccgctcaatgtggtcattcaacccagaaacaaacattcttctcaatgtgcctctccgggggacaattgtgaccagaccgctcatggaaagtgaacttgtcattggtgctgtgatcattcgtggtcacttgcgaatggccggacactccctagggcgctgtgacattaaggacctgccaaaagagatcactgtggctacatcacgaacgctttcttattacaaattaggagcgtcgcagcgtgtaggcactgattcaggttttgctgcatacaaccgctaccgtattggaaactataaattaaatacagaccacgccggtagcaacgacaatattgctttgctagtacagtaagtgacaacagatgtttcatcttgttgacttccaggttacaatagcagagatattgattatcattatgaggactttcaggattgctatttggaatcttgacgttataataagttcaatagtgagacaattatttaagcctctaactaagaagaattattcggagttagatgatgaagaacctatggagttagattatccataaaacgaacatgaaaattattctcttcctgacattgattgtatttacatcttgcgagctatatcactatcaggagtgtgttagaggtacgactgtactactaaaagaaccttgcccatcaggaacatacgagggcaattcaccatttcaccctcttgctgacaataaatttgcactaacttgcactagcacacactttgcttttgcttgtgctgacggtactcgacatacctatcagctgcgtgcaagatcagtttcaccaaaacttttcatcagacaagaggaggttcaacaagagctctactcgccactttttctcattgttgctgctctagtatttttaatactttgcttcaccattaagagaaagacagaatgaatgagctcactttaattgacttctatttgtgctttttagcctttctgctattccttgttttaataatgcttattatattttggttttcactcgaaatccaggatctagaagaaccttgtaccaaagtctaaacgaacatgaaacttctcattgttttgacttgtatctctatgcagttgcatatgcactgtagtacagcgctgtgcatctaataaacctcatgtgcttgaagatccttgtaaggtacaacactaggggtaatacttatagcactgcttggctttgtgctctaggaaaggttttaccttttcatagatggcacactatggttcaaacatgcacacctaatgttactatcaactgtcaagatccagctggtggtgcgcttatagctaggtgttggtaccttcatgaaggtcaccaaactgctgcatttagagacgtacttgttgttttaaataaacgaacaaattaaaatgtctgataatggaccccaatcaaaccaacgtagtgccccccgcattacatttggtggacccacagattcaactgacaataaccagaatggaggacgcaatggggcaaggccaaaacagcgccgaccccaaggtttacccaataatactgcgtcttggttcacagctctcactcagcatggcaaggaggaacttagattccctcgaggccagggcgttccaatcaacaccaatagtggtccagatgaccaaattggctactaccgaagagctacccgacgagttcgtggtggtgacggcaaaatgaaagagctcagccccagatggtacttctattacctaggaactggcccagaagcttcacttccctacggcgctaacaaagaaggcatcgtatgggttgcaactgagggagccttgaatacacccaaagaccacattggcacccgcaatcctaataacaatgctgccaccgtgctacaacttcctcaaggaacaacattgccaaaaggcttctacgcagagggaagcagaggcggcagtcaagcctcttctcgctcctcatcacgtagtcgcggtaattcaagaaattcaactcctggcagcagtaggggaaattctcctgctcgaatggctagcggaggtggtgaaactgccctcgcgctattgctgctagacagattgaaccagcttgagagcaaagtttctggtaaaggccaacaacaacaaggccaaactgtcactaagaaatctgctgctgaggcatctaaaaagcctcgccaaaaacgtactgccacaaaacagtacaacgtcactcaagcatttgggagacgtggtccagaacaaacccaaggaaatttcggggaccaagacctaatcagacaaggaactgattacaaacattggccgcaaattgcacaatttgctccaagtgcctctgcattctttggaatgtcacgcattggcatggaagtcacaccttcgggaacatggctgacttatcatggagccattaaattggatgacaaagatccacaattcaaagacaacgtcatactgctgaacaagcacattgacgcatacaaaacattcccaccaacagagcctaaaaaggacaaaaagaaaaagactgatgaagctcagcctttgccgcagagacaaaagaagcagcccactgtgactcttcttcctgcggctgacatggatgatttctccagacaacttcaaaattccatgagtggagcttctgctgattcaactcaggcataaacactcatgatgaccacacaaggcagatgggctatgtaaacgttttcgcaattccgtttacgatacatagtctactcttgtgcagaatgaattctcgtaactaaacagcacaagtaggtttagttaactttaatctcacatagcaatctttaatcaatgtgtaacattagggaggacttgaaagagccaccacattttcatcgaggccacgcggagtacgatcgagggtacagtgaataatgctagggagagctgcctatatggaagagccctaatgtgtaaaattaattttagtagtgctatccccatgtgattttaatagcttcttaggagaatgacaaa

SEQ ID NO: 29815 - DNA, 29711 bp, SARS Coronavirus
tacccaggaaaagccaaccaacctcgatctcttgtagatctgttctctaaacgaactttaaaatctgtgtagctgtcgctcggctgcatgcctagtgcacctacgcagtataaacaataataaattttactgtcgttgacaagaaacgagtaactcgtccctcttctgcagactgcttacggtttcgtccgtgttgcagtcgatcatcagcatacctaggtttcgtccgggtgtgaccgaaaggtaagatggagagccttgttcttggtgtcaacgagaaaacacacgtccaactcagtttgcctgtccttcaggttagagacgtgctagtgcgtggcttcggggactctgtggaagaggccctatcggaggcacgtgaacacctcaaaaatggcacttgtggtctagtagagctggaaaaaggcgtactgccccagcttgaacagccctatgtgttcattaaacgttctgatgccttaagcaccaatcacggccacaaggtcgttgagctggttgcagaaatggacggcattcagtacggtcgtagcggtataacactgggagtactcgtgccacatgtgggcgaaaccccaattgcataccgcaatgttcttcttcgtaagaacggtaataagggagccggtggtcatagctatggcatcgatctaaagtcttatgacttaggtgacgagcttggcactgatcccattgaagattatgaacaaaactggaacactaagcatggcagtggtgcactccgtgaactcactcgtgagctcaatggaggtgcagtcactcgctatgtcgacaacaatttctgtggcccagatgggtaccctcttgattgcatcaaagattttctcgcacgcgcgggcaagtcaatgtgcactctttccgaacaacttgattacatcgagtcgaagagaggtgtctactgctgccgtgaccatgagcatgaaattgcctggttcactgagcgctctgataagagctacgagcaccagacacccttcgaaattaagagtgccaagaaatttgacactttcaaaggggaatgcccaaagtttgtgtttcctcttaactcaaaagtcaaagtcattcaaccacgtgttgaaaagaaaaagactgagggtttcatggggcgtatacgctctgtgtaccctgttgcatctccacaggagtgtaacaatatgcacttgtctaccttgatgaaatgtaatcattgcgatgaagtttcatggcagacgtgcgactttctgaaagccacttgtgaacattgtggcactgaaaatttagttattgaaggacctactacatgtgggtacctacctactaatgctgtagtgaaaatgccatgtcctgcctgtcaagacccagagattggacctgagcatagtgttgcagattatcacaaccactcaaacattgaaactcgactccgcaagggaggtaggactagatgttttggaggctgtgtgtttgcctatgttggctgctataataagcgtgcctactgggttcctcgtgctagtgctgatattggctcaggccatactggcattactggtgacaatgtggagaccttgaatgaggatctccttgagatactgagtcgtgaacgtgttaacattaacattgttggcgattttcatttgaatgaagaggttgccatcattttggcatctttctctgcttctacaagtgcctttattgacactataaagagtcttgattacaagtctttcaaaaccattgttgagtcctgcggtaactataaagttaccaagggaaagcccgtaaaaggtgcttggaacattggacaacagagatcagttttaacaccactgtgtggttttccctcacaggctgctggtgttatcagatcaatttttgcgcgcacacttgatgcagcaaaccactcaattcctgatttgcaaagagcagctgtcaccatacttgatggtatttctgaacagtcattacgtcttgtcgacgccatggtttatacttcagacctgctcaccaacagtgtcattattatggcatatgtaactggtggtcttgtacaacagacttctcagtggttgtctaatcttttgggcactactgttgaaaaactcaggcctatctttgaatggattgaggcgaaacttagtgcaggagttgaatttctcaaggatgcttgggagattctcaaatttctcattacaggtgtttttgacatcgtcaagggtcaaatacaggttgcttcagataacatcaaggattgtgtaaaatgcttcattgatgttgttaacaaggcactcgaaatgtgcattgatcaagtcactatcgctggcgcaaagttgcgatcactcaacttaggtgaagtcttcatcgctcaaagcaagggactttaccgtcagtgtatacgtggcaaggagcagctgcaactactcatgcctcttaaggcaccaaaagaagtaacctttcttgaaggtgattcacatgacacagtacttacctctgaggaggttgttctcaagaacggtgaactcgaagcactcgagacgcccgttgatagcttcacaaatggagctatcgttggcacaccagtctgtgtaaatggcctcatgctcttagagattaaggacaaagaacaatactgcgcattgtctcctggtttactggctacaaacaatgtctttcgcttaaaagggggtgcaccaattaaaggtgtaacctttggagaagatactgtttgggaagttcaaggttacaagaatgtgagaatcacatttgagcttgatgaacgtgttgacaaagtgcttaatgaaaagtgctctgtctacactgttgaatccggtaccgaagttactgagtttgcatgtgttgtagcagaggctgttgtgaagactttacaaccagtttctgatctccttaccaacatgggtattgatcttgatgagtggagtgtagctacattctacttatttgatgatgctggtgaagaaaacttttcatcacgtatgtattgttccttttaccctccagatgaggaagaagaggacgatgcagagtgtgaggaagaagaaattgatgaaacctgtgaacatgagtacggtacagaggatgattatcaaggtctccctctggaatttggtgcctcagctgaaacagttcgagttgaggaagaagaagaggaagactggctggatgatactactgagcaatcagagattgagccagaaccagaacctacacctgaagaaccagttaatcagtttactggttatttaaaacttactgacaatgttgccattaaatgtgttgacatcgttaaggaggcacaaagtgctaatcctatggtgattgtaaatgctgctaacatacacctgaaacatggtggtggtgtagcaggtgcactcaacaaggcaaccaatggtgccatgcaaaaggagagtgatgattacattaagctaaatggccctcttacagtaggagggtcttgtttgctttctggacataatcttgctaagaagtgtctgcatgttgttggacctaacctaaatgcaggtgaggacatccagcttcttaaggcagcatatgaaaatttcaattcacaggacatcttacttgcaccattgttgtcagcaggcatatttggtgctaaaccacttcagtctttacaagtgtgcgtgcagacggttcgtacacaggtttatattgcagtcaatgacaaagctctttatgagcaggttgtcatggattatcttgataacctgaagcctagagtggaagcacctaaacaagaggagccaccaaacacagaagattccaaaactgaggagaaatctgtcgtacagaagcctgtcgatgtgaagccaaaaattaaggcctgcattgatgaggttaccacaacactggaagaaactaagtttcttaccaataagttactcttgtttgctgatatcaatggtaagctttaccatgattctcagaacatgcttagaggtgaagatatgtctttccttgagaaggatgcaccttacatggtaggtgatgttatcactagtggtgatatcacttgtgttgtaataccctccaaaaaggctggtggcactactgagatgctctcaagagctttgaagaaagtgccagttgatgagtatataaccacgtaccctggacaaggatgtgctggttatacacttgaggaagctaagactgctcttaagaaatgcaaatctgcattttatgtactaccttcagaagcacctaatgctaaggaagagattctaggaactgtatcctggaatttgagagaaatgcttgctcatgctgaagagacaagaaaattaatgcctatatgcatggatgttagagccataatggcaaccatccaacgtaagtataaaggaattaaaattcaagagggcatcgttgactatggtgtccgattcttcttttatactagtaaagagcctgtagcttctattattacgaagctgaactctctaaatgagccgcttgtcacaatgccaattggttatgtgacacatggttttaatcttgaagaggctgcgcgctgtatgcgttctcttaaagctcctgccgtagtgtcagtatcatcaccagatgctgttactacatataatggatacctcacttcgtcatcaaagacatctgaggagcactttgtagaaacagtttctttggctggctcttacagagattggtcctattcaggacagcgtacagagttaggtgttgaatttcttaagcgtggtgacaaaattgtgtaccacactctggagagccccgtcgagtttcatcttgacggtgaggttctttcacttgacaaactaaagagtctcttatccctgcgggaggttaagactataaaagtgttcacaactgtggacaacactaatctccacacacagcttgtggatatgtctatgacatatggacagcagtttggtccaacatacttggatggtgctgatgttacaaaaattaaacctcatgtaaatcatgagggtaagactttctttgtactacctagtgatgacacactacgtagtgaagctttcgagtactaccatactcttgatgagagttttcttggtaggtacatgtctgctttaaaccacacaaagaaatggaaatttcctcaagttggtggtttaacttcaattaaatgggctgataacaattgttatttgtctagtgttttattagcacttcaacagcttgaagtcaaattcaatgcaccagcacttcaagaggcttattatagagcccgtgctggtgatgctgctaacttttgtgcactcatactcgcttacagtaataaaactgttggcgagcttggtgatgtcagagaaactatgacccatcttctacagcatgctaatttggaatctgcaaagcgagttcttaatgtggtgtgtaaacattgtggtcagaaaactactaccttaacgggtgtagaagctgtgatgtatatgggtactctatcttatgataatcttaagacaggtgtttccattccatgtgtgtgtggtcgtgatgctacacaatatctagtacaacaagagtcttcttttgttatgatgtctgcaccacctgctgagtataaattacagcaaggtacattcttatgtgcgaatgagtacactggtaactatcagtgtggtcattacactcatataactgctaaggagaccctctatcgtattgacggagctcaccttacaaagatgtcagagtacaaaggaccagtgactgatgttttctacaaggaaacatcttacactacaaccatcaagcctgtgtcgtataaactcgatggagttacttacacagagattgaaccaaaattggatgggtattataaaaaggataatgcttactatacagagcagcctatagaccttgtaccaactcaaccattaccaaatgcgagttttgataatttcaaactcacatgttctaacacaaaatttgctgatgatttaaatcaaatgacaggcttcacaaagccagcttcacgagagctatctgtcacattcttcccagacttgaatggcgatgtagtggctattgactatagacactattcagcgagtttcaagaaaggtgctaaattactgcataagccaattgtttggcacattaaccaggctacaaccaagacaacgttcaaaccaaacacttggtgtttacgttgtctttggagtacaaagccagtagatacttcaaattcatttgaagttctggcagtagaagacacacaaggaatggacaatcttgcttgtgaaagtcaacaacccacctctgaagaagtagtggaaaatcctaccatacagaaggaagtcatagagtgtgacgtgaaaactaccgaagttgtaggcaatgtcatacttaaaccatcagatgaaggtgttaaagtaacacaagagttaggtcatgaggatcttatggctgcttatgtggaaaacacaagcattaccattaagaaacctaatgagctttcactagccttaggtttaaaaacaattgccactcatggtattgctgcaattaatagtgttccttggagtaaaattttggcttatgtcaaaccattcttaggacaagcagcaattacaacatcaaattgcgctaagagattagcacaacgtgtgtttaacaattatatgccttatgtgtttacattattgttccaattgtgtacttttactaaaagtaccaattctagaattagagcttcactacctacaactattgctaaaaatagtgttaagagtgttgctaaattatgtttggatgccggcattaattatgtgaagtcacccaaattttctaaattgttcacaatcgctatgtggctattgttgttaagtatttgcttaggttctctaatctgtgtaactgctgcttttggtgtactcttatctaattttggtgctccttcttattgtaatggcgttagagaattgtatcttaattcgtctaacgttactactatggatttctgtgaaggttcttttccttgcagcatttgtttaagtggattagactcccttgattcttatccagctcttgaaaccattcaggtgacgatttcatcgtacaagctagacttgacaattttaggtctggccgctgagtgggttttggcatatatgttgttcacaaaattcttttatttattaggtctttcagctataatgcaggtgttctttggctattttgctagtcatttcatcagcaattcttggctcatgtggtttatcattagtattgtacaaatggcacccgtttctgcaatggttaggatgtacatcttctttgcttctttctactacatatggaagagctatgttcatatcatggatggttgcacctcttcgacttgcatgatgtgctataagcgcaatcgtgccacacgcgttgagtgtacaactattgttaatggcatgaagagatctttctatgtctatgcaaatggaggccgtggcttctgcaagactcacaattggaattgtctcaattgtgacacattttgcactggtagtacattcattagtgatgaagttgctcgtgatttgtcactccagtttaaaagaccaatcaaccctactgaccagtcatcgtatattgttgatagtgttgctgtgaaaaatggcgcgcttcacctctactttgacaaggctggtcaaaagacctatgagagacatccgctctcccattttgtcaatttagacaatttgagagctaacaacactaaaggttcactgcctattaatgtcatagtttttgatggcaagtccaaatgcgacgagtctgcttctaagtctgcttctgtgtactacagtcagctgatgtgccaacctattctgttgcttgaccaagctcttgtatcagacgttggagatagtactgaagtttccgttaagatgtttgatgcttatgtcgacaccttttcagcaacttttagtgttcctatggaaaaacttaaggcacttgttgctacagctcacagcgagttagcaaagggtgtagctttagatggtgtcctttctacattcgtgtcagctgcccgacaaggtgttgttgataccgatgttgacacaaaggatgttattgaatgtctcaaactttcacatcactctgacttagaagtgacaggtgacagttgtaacaatttcatgctcacctataataaggttgaaaacatgacgcccagagatcttggcgcatgtattgactgtaatgcaaggcatatcaatgcccaagtagcaaaaagtcacaatgtttcactcatctggaatgtaaaagactacatgtctttatctgaacagctgcgtaaacaaattcgtagtgctgccaagaagaacaacataccttttagactaacttgtgctacaactagacaggttgtcaatgtcataactactaaaatctcactcaagggtggtaagattgttagtacttgttttaaacttatgcttaaggccacattattgtgcgttcttgctgcattggtttgttatatcgttatgccagtacatacattgtcaatccatgatggttacacaaatgaaatcattggttacaaagccattcaggatggtgtcactcgtgacatcatttctactgatgattgttttgcaaataaacatgctggttttgacgcatggtttagccagcgtggtggttcatacaaaaatgacaaaagctgccctgtagtagctgctatcattacaagagagattggtttcatagtgcctggcttaccgggtactgtgctgagagcaatcaatggtgacttcttgcattttctacctcgtgtttttagtgctgttggcaacatttgctacacaccttccaaactcattgagtatagtgattttgctacctctgcttgcgttcttgctgctgagtgtacaatttttaaggatgctatgggcaaacctgtgccatattgttatgacactaatttgctagagggttctatttcttatagtgagcttcgtccagacactcgttatgtgcttatggatggttccatcatacagtttcctaacacttacctggagggttctgttagagtagtaacaacttttgatgctgagtactgtagacatggtacatgcgaaaggtcagaagtaggtatttgcctatctaccagtggtagatgggttcttaataatgagcattacagagctctatcaggagttttctgtggtgttgatgcgatgaatctcatagctaacatctttactcctcttgtgcaacctgtgggtgctttagatgtgtctgcttcagtagtggctggtggtattattgccatattggtgacttgtgctgcctactactttatgaaattcagacgtgtttttggtgagtacaaccatgttgttgctgctaatgcacttttgtttttgatgtctttcactatactctgtctggtaccagcttacagctttctgccgggagtctactcagtcttttacttgtacttgacattctatttcaccaatgatgtttcattcttggctcaccttcaatggtttgccatgttttctcctattgtgcctttttggataacagcaatctatgtattctgtatttctctgaagcactgccattggttctttaacaactatcttaggaaaagagtcatgtttaatggagttacatttagtaccttcgaggaggctgctttgtgtacctttttgctcaacaaggaaatgtacctaaaattgcgtagcgagacactgttgccacttacacagtataacaggtatcttgctctatataacaagtacaagtatttcagtggagccttagatactaccagctatcgtgaagcagcttgctgccacttagcaaaggctctaaatgactttagcaactcaggtgctgatgttctctaccaaccaccacagacatcaatcacttctgctgttctgcagagtggttttaggaaaatggcattcccgtcaggcaaagttgaagggtgcatggtacaagtaacctgtggaactacaactcttaatggattgtggttggatgacacagtatactgtccaagacatgtcatttgcacagcagaagacatgcttaatcctaactatgaagatctgctcattcgcaaatccaaccatagctttcttgttcaggctggcaatgttcaacttcgtgttattggccattctatgcaaaattgtctgcttaggcttaaagttgatacttctaaccctaagacacccaagtataaatttgtccgtatccaacctggtcaaacattttcagttctagcatgctacaatggttcaccatctggtgtttatcagtgtgccatgagacctaatcataccattaaaggttctttccttaatggatcatgtggtagtgttggttttaacattgattatgattgcgtgtctttctgctatatgcatcatatggagcttccaacaggagtacacgctggtactgacttagaaggtaaattctatggtccatttgttgacagacaaactgcacaggctgcaggtacagacacaaccataacattaaatgttttggcatggctgtatgctgctgttatcaatggtgataggtggtttcttaatagattcaccactactttgaatgactttaaccttgtggcaatgaagtacaactatgaacctttgacacaagatcatgttgacatattgggacctctttctgctcaaacaggaattgccgtcttagatatgtgtgctgctttgaaagagctgctgcagaatggtatgaatggtcgtactatccttggtagcactattttagaagatgagtttacaccatttgatgttgttagacaatgctctggtgttaccttccaaggtaagttcaagaaaattgttaagggcactcatcattggatgcttttaactttcttgacatcactattgattcttgttcaaagtacacagtggtcactgtttttctttgtttacgagaatgctttcttgccatttactcttggtattatggcaattgctgcatgtgctatgctgcttgttaagcataagcacgcattcttgtgcttgtttctgttaccttctcttgcaacagttgcttactttaatatggtctacatgcctgctagctgggtgatgcgtatcatgacatggcttgaattggctgacactagcttgtctggttataggcttaaggattgtgttatgtatgcttcagctttagttttgcttattctcatgacagctcgcactgtttatgatgatgctgctagacgtgtttggacactgatgaatgtcattacacttgtttacaaagtctactatggtaatgctttagatcaagctatttccatgtgggccttagttatttctgtaacctctaactattctggtgtcgttacgactatcatgtttttagctagagctatagtgtttgtgtgtgttgagtattacccattgttatttattactggcaacaccttacagtgtatcatgcttgtttattgtttcttaggctattgttgctgctgctactttggccttttctgtttactcaaccgttacttcaggcttactcttggtgtttatgactacttggtctctacacaagaatttaggtatatgaactcccaggggcttttgcctcctaagagtagtattgatgctttcaagcttaacattaagttgttgggtattggaggtaaaccatgtatcaaggttgctactgtacagtctaaaatgtctgacgtaaagtgcacatctgtggtactgctctcggttcttcaacaacttagagtagagtcatcttctaaattgtgggcacaatgtgtacaactccacaatgatattcttcttgcaaaagacacaactgaagctttcgagaagatggtttctcttttgtctgttttgctatccatgcagggtgctgtagacattaataggttgtgcgaggaaatgctcgataaccgtgctactcttcaggctattgcttcagaatttagttctttaccatcatatgccgcttatgccactgcccaggaggcctatgagcaggctgtagctaatggtgattctgaagtcgttctcaaaaagttaaagaaatctttgaatgtggctaaatctgagtttgaccgtgatgctgccatgcaacgcaagttggaaaagatggcagatcaggctatgacccaaatgtacaaacaggcaagatctgaggacaagagggcaaaagtaactagtgctatgcaaacaatgctcttcactatgcttaggaagcttgataatgatgcacttaacaacattatcaacaatgcgcgtgatggttgtgttccactcaacatcataccattgactacagcagccaaactcatggttgttgtccctgattatggtacctacaagaacacttgtgatggtaacacctttacatatgcatctgcactctgggaaatccagcaagttgttgatgcggatagcaagattgttcaacttagtgaaattaacatggacaattcaccaaatttggcttggcctcttattgttacagctctaagagccaactcagctgttaaactacagaataatgaactgagtccagtagcactacgacagatgtcctgtgcggctggtaccacacaaacagcttgtactgatgacaatgcacttgcctactataacaattcgaagggaggtaggtttgtgctggcattactatcagaccaccaagatctcaaatgggctagattccctaagagtgatggtacaggtacaatttacacagaactggaaccaccttgtaggtttgttacagacacaccaaaagggcctaaagtgaaatacttgtacttcatcaaaggcttaaacaacctaaatagaggtatggtgctgggcagtttagctgctacagtacgtcttcaggctggaaatgctacagaagtacctgccaattcaactgtgctttccttctgtgcttttgcagtagaccctgctaaagcatataaggattacctagcaagtggaggacaaccaatcaccaactgtgtgaagatgttgtgtacacacactggtacaggacaggcaattactgtaacaccagaagctaacatggaccaagagtcctttggtggtgcttcatgttgtctgtattgtagatgccacattgaccatccaaatcctaaaggattctgtgacttgaaaggtaagtacgtccaaatacctaccacttgtgctaatgacccagtgggttttacacttagaaacacagtctgtaccgtctgcggaatgtggaaaggttatggctgtagttgtgaccaactccgcgaacccttgatgcagtctgcggatgcatcaacgtttttaaacgggtttgcggtgtaagtgcagcccgtcttacaccgtgcggcacaggcactagtactgatgtcgtctacagggcttttgatatttacaacgaaaaagttgctggttttgcaaagttcctaaaaactaattgctgtcgcttccaggagaaggatgaggaaggcaatttattagactcttactttgtagttaagaggcatactatgtctaactaccaacatgaagagactatttataacttggttaaagattgtccagcggttgctgtccatgactttttcaagtttagagtagatggtgacatggtaccacatatatcacgtcagcgtctaactaaatacacaatggctgatttagtctatgctctacgtcattttgatgagggtaattgtgatacattaaaagaaatactcgtcacatacaattgctgtgatgatgattatttcaataagaaggattggtatgacttcgtagagaatcctgacatcttacgcgtatatgctaacttaggtgagcgtgtacgccaatcattattaaagactgtacaattctgcgatgctatgcgtgatgcaggcattgtaggcgtactgacattagataatcaggatcttaatgggaactggtacgatttcggtgatttcgtacaagtagcaccaggctgcggagttcctattgtggattcatattactcattgctgatgcccatcctcactttgactagggcattggctgctgagtcccatatggatgctgatctcgcaaaaccacttattaagtgggatttgctgaaatatgattttacggaagagagactttgtctcttcgaccgttattttaaatattgggaccagacataccatcccaattgtattaactgtttggatgataggtgtatccttcattgtgcaaactttaatgtgttattttctactgtgtttccacctacaagttttggaccactagtaagaaaaatatttgtagatggtgttccttttgttgtttcaactggataccattttcgtgagttaggagtcgtacataatcaggatgtaaacttacatagctcgcgtctcagtttcaaggaacttttagtgtatgctgctgatccagctatgcatgcagcttctggcaatttattgctagataaacgcactacatgcttttcagtagctgcactaacaaacaatgttgcttttcaaactgtcaaacccggtaattttaataaagacttttatgactttgctgtgtctaaaggtttctttaaggaaggaagttctgttgaactaaaacacttcttctttgctcaggatggcaacgctgctatcagtgattatgactattatcgttataatctgccaacaatgtgtgatatcagacaactcctattcgtagttgaagttgttgataaatactttgattgttacgatggtggctgtattaatgccaaccaagtaatcgttaacaatctggataaatcagctggtttcccatttaataaatggggtaaggctagactttattatgactcaatgagttatgaggatcaagatgcacttttcgcgtatactaagcgtaatgtcatccctactataactcaaatgaatcttaagtatgccattagtgcaaagaatagagctcgcaccgtagctggtgtctctatctgtagtactatgacaaatagacagtttcatcagaaattattgaagtcaatagccgccactagaggagctactgtggtaattggaacaagcaagttttacggtggctggcataatatgttaaaaactgtttacagtgatgtagaaactccacaccttatgggttgggattatccaaaatgtgacagagccatgcctaacatgcttaggataatggcctctcttgttcttgctcgcaaacataacacttgctgtaacttatcacaccgtttctacaggttagctaacgagtgtgcgcaagtattaagtgagatggtcatgtgtggcggctcactatatgttaaaccaggtggaacatcatccggtgatgctacaactgcttatgctaatagtgtctttaacatttgtcaagctgttacagccaatgtaaatgcacttctttcaactgatggtaataagatagctgacaagtatgtccgcaatctacaacacaggctctatgagtgtctctatagaaatagggatgttgatcatgaattcgtggatgagttttacgcttacctgcgtaaacatttctccatgatgattctttctgatgatgccgttgtgtgctataacagtaactatgcggctcaaggtttagtagctagcattaagaactttaaggcagttctttattatcaaaataatgtgttcatgtctgaggcaaaatgttggactgagactgaccttactaaaggacctcacgaattttgctcacagcatacaatgctagttaaacaaggagatgattacgtgtacctgccttacccagatccatcaagaatattaggcgcaggctgttttgtcgatgatattgtcaaaacagatggtacacttatgattgaaaggttcgtgtcactggctattgatgcttacccacttacaaaacatcctaatcaggagtatgctgatgtctttcacttgtatttacaatacattagaaagttacatgatgagcttactggccacatgttggacatgtattccgtaatgctaactaatgataacacctcacggtactgggaacctgagttttatgaggctatgtacacaccacatacagtcttgcaggctgtaggtgcttgtgtattgtgcaattcacagacttcacttcgttgcggtgcctgtattaggagaccattcctatgttgcaagtgctgctatgaccatgtcatttcaacatcacacaaattagtgttgtctgttaatccctatgtttgcaatgccccaggttgtgatgtcactgatgtgacacaactgtatctaggaggtatgagctattattgcaagtcacataagcctcccattagttttccattatgtgctaatggtcaggtttttggtttatacaaaaacacatgtgtaggcagtgacaatgtcactgacttcaatgcgatagcaacatgtgattggactaatgctggcgattacatacttgccaacacttgtactgagagactcaagcttttcgcagcagaaacgctcaaagccactgaggaaacatttaagctgtcatatggtattgccactgtacgcgaagtactctctgacagagaattgcatctttcatgggaggttggaaaacctagaccaccattgaacagaaactatgtctttactggttaccgtgtaactaaaaatagtaaagtacagattggagagtacacctttgaaaaaggtgactatggtgatgctgttgtgtacagaggtactacgacatacaagttgaatgttggtgattactttgtgttgacatctcacactgtaatgccacttagtgcacctactctagtgccacaagagcactatgtgagaattactggcttgtacccaacactcaacatctcagatgagttttctagcaatgttgcaaattatcaaaaggtcggcatgcaaaagtactctacactccaaggaccacctggtactggtaagagtcattttgccatcggacttgctctctattacccatctgctcgcatagtgtatacggcatgctctcatgcagctgttgatgccctatgtgaaaaggcattaaaatatttgcccatagataaatgtagtagaatcatacctgcgcgtgcgcgcgtagagtgttttgataaattcaaagtgaattcaacactagaacagtatgttttctgcactgtaaatgcattgccagaaacaactgctgacattgtagtctttgatgaaatctctatggctactaattatgacttgagtgttgtcaatgctagacttcgtgcaaaacactacgtctatattggcgatcctgctcaattaccagccccccgcacattgctgactaaaggcacactagaaccagaatattttaattcagtgtgcagacttatgaaaacaataggtccagacatgttccttggaacttgtcgccgttgtcctgctgaaattgttgacactgtgagtgctttagtttatgacaataagctaaaagcacacaaggataagtcagctcaatgcttcaaaatgttctacaaaggtgttattacacatgatgtttcatctgcaatcaacagacctcaaataggcgttgtaagagaatttcttacacgcaatcctgcttggagaaaagctgtttttatctcaccttataattcacagaacgctgtagcttcaaaaatcttaggattgcctacgcagactgttgattcatcacagggttctgaatatgactatgtcatattcacacaaactactgaaacagcacactcttgtaatgtcaaccgcttcaatgtggctatcacaagggcaaaaattggcattttgtgcataatgtctgatagagatctttatgacaaactgcaatttacaagtctagaaataccacgtcgcaatgtggctacattacaagcagaaaatgtaactggactttttaaggactgtagtaagatcattactggtcttcatcctacacaggcacctacacacctcagcgttgatataaagttcaagactgaaggattatgtgttgacataccaggcataccaaaggacatgacctaccgtagactcatctctatgatgggtttcaaaatgaattaccaagtcaatggttaccctaatatgtttatcacccgcgaagaagctattcgtcacgttcgtgcgtggattggctttgatgtagagggctgtcatgcaactagagatgctgtgggtactaacctacctctccagctaggattttctacaggtgttaacttagtagctgtaccgactggttatgttgacactgaaaataacacagaattcaccagagttaatgcaaaacctccaccaggtgaccagtttaaacatcttataccactcatgtataaaggcttgccctggaatgtagtgcgtattaagatagtacaaatgctcagtgatacactgaaaggattgtcagacagagtcgtgttcgtcctttgggcgcatggctttgagcttacatcaatgaagtactttgtcaagattggacctgaaagaacgtgttgtctgtgtgacaaacgtgcaacttgcttttctacttcatcagatacttatgcctgctggaatcattctgtgggttttgactatgtctataacccatttatgattgatgttcagcagtggggctttacgggtaaccttcagagtaaccatgaccaacattgccaggtacatggaaatgcacatgtggctagttgtgatgctatcatgactagatgtttagcagtccatgagtgctttgttaagcgcgttgattggtctgttgaataccctattataggagatgaactgagggttaattctgcttgcagaaaagtacaacacatggttgtgaagtctgcattgcttgctgataagtttccagttcttcatgacattggaaatccaaaggctatcaagtgtgtgcctcaggctgaagtagaatggaagttctacgatgctcagccatgtagtgacaaagcttacaaaatagaggaactcttctattcttatgctacacatcacgataaattcactgatggtgtttgtttgttttggaattgtaacgttgatcgttacccagccaatgcaattgtgtgtaggtttgacacaagagtcttgtcaaacttgaacttaccaggctgtgatggtggtagtttgtatgtgaataagcatgcattccacactccagctttcgataaaagtgcatttactaatttaaagcaattgcctttcttttactattctgatagtccttgtgagtctcatggcaaacaagtagtgtcggatattgattatgttccactcaaatctgctacgtgtattacacgatgcaatttaggtggtgctgtttgcagacaccatgcaaatgagtaccgacagtacttggatgcatataatatgatgatttctgctggatttagcctatggatttacaaacaatttgatacttataacctgtggaatacatttaccaggttacagagtttagaaaatgtggcttataatgttgttaataaaggacactttgatggacacgccggcgaagcacctgtttccatcattaataatgctgtttacacaaaggtagatggtattgatgtggagatctttgaaaataagacaacacttcctgttaatgttgcatttgagctttgggctaagcgtaacattaaaccagtgccagagattaagatactcaataatttgggtgttgatatcgctgctaatactgtaatctgggactacaaaagagaagccccagcacatgtatctacaataggtgtctgcacaatgactgacattgccaagaaacctactgagagtgcttgttcttcacttactgtcttgtttgatggtagagtggaaggacaggtagacctttttagaaacgcccgtaatggtgttttaataacagaaggttcagtcaaaggtctaacaccttcaaagggaccagcacaagctagcgtcaatggagtcacattaattggagaatcagtaaaaacacagtttaactactttaagaaagtagacggcattattcaacagttgcctgaaacctactttactcagagcagagacttagaggattttaagcccagatcacaaatggaaactgactttctcgagctcgctatggatgaattcatacagcgatataagctcgagggctatgccttcgaacacatcgtttatggagatttcagtcatggacaacttggcggtcttcatttaatgataggcttagccaagcgctcacaagattcaccacttaaattagaggattttatccctatggacagcacagtgaaaaattacttcataacagatgcgcaaacaggttcatcaaaatgtgtgtgttctgtgattgatcttttacttgatgactttgtcgagataataaagtcacaagatttgtcagtgatttcaaaagtggtcaaggttacaattgactatgctgaaatttcattcatgctttggtgtaaggatggacatgttgaaaccttctacccaaaactacaagcaagtcaagcgtggcaaccaggtgttgcgatgcctaacttgtacaagatgcaaagaatgcttcttgaaaagtgtgaccttcagaattatggtgaaaatgctgttataccaaaaggaataatgatgaatgtcgcaaagtatactcaactgtgtcaatacttaaatacacttactttagctgtaccctacaacatgagagttattcactttggtgctggctctgataaaggagttgcaccaggtacagctgtgctcagacaatggttgccaactggcacactacttgtcgattcagatcttaatgacttcgtctccgacgcagattctactttaattggagactgtgcaacagtacatacggctaataaatgggaccttattattagcgatatgtatgaccctaggaccaaacatgtgacaaaagagaatgactctaaagaagggtttttcacttatctgtgtggatttataaagcaaaaactagccctgggtggttctatagctgtaaagataacagagcattcttggaatgctgacctttacaagcttatgggccatttctcatggtggacagcttttgttacaaatgtaaatgcatcatcatcggaagcatttttaattggggctaactatcttggcaagccgaaggaacaaattgatggctataccatgcatgctaactacattttctggaggaacacaaatcctatccagttgtcttcctattcactctttgacatgagcaaatttcctcttaaattaagaggaactgctgtaatgtctcttaaggagaatcaaatcaatgatatgatttattctcttctggaaaaaggtaggcttatcattagagaaaacaacagagttgtggtttcaagtgatattcttgttaacaactaaacgaacatgtttattttcttattatttcttactctcactagtggtagtgaccttgaccggtgcaccacttttgatgatgttcaagctcctaattacactcaacatacttcatctatgaggggggtttactatcctgatgaaatttttagatcagacactctttatttaactcaggatttatttcttccattttattctaatgttacagggtttcatactattaatcatacgtttggcaaccctgtcataccttttaaggatggtatttattttgctgccacagagaaatcaaatgttgtccgtggttgggtttttggttctaccatgaacaacaagtcacagtcggtgattattattaacaattctactaatgttgttatacgagcatgtaactttgaattgtgtgacaaccctttctttgctgtttctaaacccatgggtacacagacacatactatgatattcgataatgcatttaattgcactttcgagtacatatctgatgccttttcgcttgatgtttcagaaaagtcaggtaattttaaacacttacgagagtttgtgtttaaaaataaagatgggtttctctatgtttataagggctatcaacctatagatgtagttcgtgatctaccttctggttttaacactttgaaacctatttttaagttgcctcttggtattaacattacaaattttagagccattcttacagccttttcacctgctcaagacatttggggcacgtcagctgcagcctattttgttggctatttaaagccaactacatttatgctcaagtatgatgaaaatggtacaatcacagatgctgttgattgttctcaaaatccacttgctgaactcaaatgctctgttaagagctttgagattgacaaaggaatttaccagacctctaatttcagggttgttccctcaggagatgttgtgagattccctaatattacaaacttgtgtccttttggagaggtttttaatgctactaaattcccttctgtctatgcatgggagagaaaaaaaatttctaattgtgttgctgattactctgtgctctacaactcaacatttttttcaacctttaagtgctatggcgtttctgccactaagttgaatgatctttgcttctccaatgtctatgcagattcttttgtagtcaagggagatgatgtaagacaaatagcgccaggacaaactggtgttattgctgattataattataaattgccagatgatttcatgggttgtgtccttgcttggaatactaggaacattgatgctacttcaactggtaattataattataaatataggtatcttagacatggcaagcttaggccctttgagagagacatatctaatgtgcctttctcccctgatggcaaaccttgcaccccacctgctcttaattgttattggccattaaatgattatggtttttacaccactactggcattggctaccaaccttacagagttgtagtactttcttttgaacttttaaatgcaccggccacggtttgtggaccaaaattatccactgaccttattaagaaccagtgtgtcaattttaattttaatggactcactggtactggtgtgttaactccttcttcaaagagatttcaaccatttcaacaatttggccgtgatgtttctgatttcactgattccgttcgagatcctaaaacatctgaaatattagacatttcaccttgctcttttgggggtgtaagtgtaattacacctggaacaaatgcttcatctgaagttgctgttctatatcaagatgttaactgcactgatgtttctacagcaattcatgcagatcaactcacaccagcttggcgcatatattctactggaaacaatgtattccagactcaagcaggctgtcttataggagctgagcatgtcgacacttcttatgagtgcgacattcctattggagctggcatttgtgctagttaccatacagtttctttattacgtagtactagccaaaaatctattgtggcttatactatgtctttaggtgctgatagttcaattgcttactctaataacaccattgctatacctactaacttttcaattagcattactacagaagtaatgcctgtttctatggctaaaacctccgtagattgtaatatgtacatctgcggagattctactgaatgtgctaatttgcttctccaatatggtagcttttgcacacaactaaatcgtgcactctcaggtattgctgctgaacaggatcgcaacacacgtgaagtgttcgctcaagtcaaacaaatgtacaaaaccccaactttgaaatattttggtggttttaatttttcacaaatattacctgaccctctaaagccaactaagaggtcttttattgaggacttgctctttaataaggtgacactcgctgatgctggcttcatgaagcaatatggcgaatgcctaggtgatattaatgctagagatctcatttgtgcgcagaagttcaatggacttacagtgttgccacctctgctcactgatgatatgattgctgcctacactgctgctctagttagtggtactgccactgctggatggacatttggtgctggcgctgctcttcaaataccttttgctatgcaaatggcatataggttcaatggcattggagttacccaaaatgttctctatgagaaccaaaaacaaatcgccaaccaatttaacaaggcgattagtcaaattcaagaatcacttacaacaacatcaactgcattgggcaagctgcaagacgttgttaaccagaatgctcaagcattaaacacacttgttaaacaacttagctctaattttggtgcaatttcaagtgtgctaaatgatatcctttcgcgacttgataaagtcgaggcggaggtacaaattgacaggttaattacaggcagacttcaaagccttcaaacctatgtaacacaacaactaatcagggctgctgaaatcagggcttctgctaatcttgctgctactaaaatgtctgagtgtgttcttggacaatcaaaaagagttgacttttgtggaaagggctaccaccttatgtccttcccacaagcagccccgcatggtgttgtcttcctacatgtcacgtatgtgccatcccaggagaggaacttcaccacagcgccagcaatttgtcatgaaggcaaagcatacttccctcgtgaaggtgtttttgtgtttaatggcacttcttggtttattacacagaggaacttcttttctccacaaataattactacagacaatacatttgtctcaggaaattgtgatgtcgttattggcatcattaacaacacagtttatgatcctctgcaacctgagcttgactcattcaaagaagagctggacaagtacttcaaaaatcatacatcaccagatgttgatcttggcgacatttcaggcattaacgcttctgtcgtcaacattcaaaaagaaattgaccgcctcaatgaggtcgctaaaaatttaaatgaatcactcattgaccttcaagaattgggaaaatatgagcaatatattaaatggccttggtatgtttggctcggcttcattgctggactaattgccatcgtcatggttacaatcttgctttgttgcatgactagttgttgcagttgcctcaagggtgcatgctcttgtggttcttgctgcaagtttgatgaggatgactctgagccagttctcaagggtgtcaaattacattacacataaacgaacttatggatttgtttatgagattttttactcttggatcaattactgcacagccagtaaaaattgacaatgcttctcctgcaagtactgttcatgctacagcaacgataccgctacaagcctcactccctttcggatggcttgttattggcgttgcatttcttgctgtttttcagagcgctaccaaaataattgcgctcaataaaagatggcagctagccctttataagggcttccagttcatttgcaatttactgctgctatttgttaccatctattcacatcttttgcttgtcgctgcaggtatggaggcgcaatttttgtacctctatgccttgatatattttctacaatgcatcaacgcatgtagaattattatgagatgttggctttgttggaagtgcaaatccaagaacccattactttatgatgccaactactttgtttgctggcacacacataactatgactactgtataccatataacagtgtcacagatacaattgtcgttactgaaggtgacggcatttcaacaccaaaactcaaagaagactaccaaattggtggttattctgaggataggcactcaggtgttaaagactatgtcgttgtacatggctatttcaccgaagtttactaccagcttgagtctacacaaattactacagacactggtattgaaaatgctacattcttcatctttaacaagcttgttaaagacccaccgaatgtgcaaatacacacaatcgacggctcttcaggagttgctaatccagcaatggatccaatttatgatgagccgacgacgactactagcgtgcctttgtaagcacaagaaagtgagtacgaacttatgtactcattcgtttcggaagaaacaggtacgttaatagttaatagcgtacttctttttcttgctttcgtggtattcttgctagtcacactagccatccttactgcgcttcgattgtgtgcgtactgctgcaatattgttaacgtgagtttagtaaaaccaacggtttacgtctactcgcgtgttaaaaatctgaactcttctgaaggagttcctgatcttctggtctaaacgaactaactattattattattctgtttggaactttaacattgcttatcatggcagacaacggtactattaccgttgaggagcttaaacaactcctggaacaatggaacctagtaataggtttcctattcctagcctggattatgttactacaatttgcctattctaatcggaacaggtttttgtacataataaagcttgttttcctctggctcttgtggccagtaacacttgcttgttttgtgcttgctgctgtctacagaattaattgggtgactggcgggattgcgattgcaatggcttgtattgtaggcttgatgtggcttagctacttcgttgcttccttcaggctgtttgctcgtacccgctcaatgtggtcattcaacccagaaacaaacattcttctcaatgtgcctctccgggggacaattgtgaccagaccgctcatggaaagtgaacttgtcattggtgctgtgatcattcgtggtcacttgcgaatggccggacactccctagggcgctgtgacattaaggacctgccaaaagagatcactgtggctacatcacgaacgctttcttattacaaattaggagcgtcgcagcgtgtaggcactgattcaggttttgctgcatacaaccgctaccgtattggaaactataaattaaatacagaccacgccggtagcaacgacaatattgctttgctagtacagtaagtgacaacagatgtttcatcttgttgacttccaggttacaatagcagagatattgattatcattatgaggactttcaggattgctatttggaatcttgacgttataataagttcaatagtgagacaattatttaagcctctaactaagaagaattattcggagttagatgatgaagaacctatggagttagattatccataaaacgaacatgaaaattattctcttcctgacattgattgtatttacatcttgcgagctatatcactatcaggagtgtgttagaggtacgactgtactactaaaagaaccttgcccatcaggaacatacgagggcaattcaccatttcaccctcttgctgacaataaatttgcactaacttgcactagcacacactttgcttttgcttgtgctgacggtactcgacatacctatcagctgcgtgcaagatcagtttcaccaaaacttttcatcagacaagaggaggttcaacaagagctctactcgccactttttctcattgttgctgctctagtatttttaatactttgcttcaccattaagagaaagacagaatgaatgagctcactttaattgacttctatttgtgctttttagcctttctgctattccttgttttaataatgcttattatattttggttttcactcgaaatccaggatctagaagaaccttgtaccaaagtctaaacgaacatgaaacttctcattgttttgacttgtatttctctatgcagttgcatatgcactgtagtacagcgctgtgcatctaataaacctcatgtgcttgaagatccttgtaaggtacaacactaggggtaatacttatagcactgcttggctttgtgctctaggaaaggttttaccttttcatagatggcacactatggttcaaacatgcacacctaatgttactatcaactgtcaagatccagctggtggtgcgcttatagctaggtgttggtaccttcatgaaggtcaccaaactgctgcatttagagacgtacttgttgttttaaataaacgaacaaattaaaatgtctgataatggaccccaatcaaaccaacgtagtgccccccgcattacatttggtggacccacagattcaactgacaataaccagaatggaggacgcaatggggcaaggccaaaacagcgccgaccccaaggtttacccaataatactgcgtcttggttcacagctctcactcagcatggcaaggaggaacttagattccctcgaggccagggcgttccaatcaacaccaatagtggtccagatgaccaaattggctactaccgaagagctacccgacgagttcgtggtggtgacggcaaaatgaaagagctcagccccagatggtacttctattacctaggaactggcccagaagcttcacttccctacggcgctaacaaagaaggcatcgtatgggttgcaactgagggagccttgaatacacccaaagaccacattggcacccgcaatcctaataacaatgctgccaccgtgctacaacttcctcaaggaacaacattgccaaaaggcttctacgcagagggaagcagaggcggcagtcaagcctcttctcgctcctcatcacgtagtcgcggtaattcaagaaattcaactcctggcagcagtaggggaaattctcctgctcgaatggctagcggaggtggtgaaactgccctcgcgctattgctgctagacagattgaaccagcttgagagcaaagtttctggtaaaggccaacaacaacaaggccaaactgtcactaagaaatctgctgctgaggcatctaaaaagcctcgccaaaaacgtactgccacaaaacagtacaacgtcactcaagcatttgggagacgtggtccagaacaaacccaaggaaatttcggggaccaagacctaatcagacaaggaactgattacaaacattggccgcaaattgcacaatttgctccaagtgcctctgcattctttggaatgtcacgcattggcatggaagtcacaccttcgggaacatggctgacttatcatggagccattaaattggatgacaaagatccacaattcaaagacaacgtcatactgctgaacaagcacattgacgcatacaaaacattcccaccaacagagcctaaaaaggacaaaaagaaaaagactgatgaagctcagcctttgccgcagagacaaaagaagcagcccactgtgactcttcttcctgcggctgacatggatgatttctccagacaacttcaaaattccatgagtggagcttctgctgattcaactcaggcataaacactcatgatgaccacacaaggcagatgggctatgtaaacgttttcgcaattccgtttacgatacatagtctactcttgtgcagaatgaattctcgtaactaaacagcacaagtaggtttagttaactttaatctcacatagcaatctttaatcaatgtgtaacattagggaggacttgaaagagccaccacattttcatcgaggccacgcggagtacgatcgagggtacagtgaataatgctagggagagctgcctatatggaagagccctaatgtgtaaaattaattttagtagtgctatccccatgtgattttaatagcttcttaggagaatgac

SEQ ID NO: 29816 - DNA, 29715 bp, SARS Coronavirus
ctacccaggaaaagccaacgaacctcgatctcttgtagatctgttctctaaacgaactttaaaatctgtgtagctgtcgctcggctgcatgcctagtgcacctacgcagtataaacaataataaattttactgtcgttgacaagaaacgagtaactcgtccctcttctgcagactgcttacggtttcgtccgtgttgcagtcgatcatcagcatacctaggtttcgtccgggtgtgaccgaaaggtaagatggagagccttgttcttggtgtcaacgagaaaacacacgtccaactcagtttgcctgtccttcaggttagagacgtgctagtgcgtggcttcggggactctgtggaagaggccctatcggaggcacgtgaacacctcaaaaatggcacttgtggtctagtagagctggaaaaaggcgtactgccccagcttgaacagccctatgtgttcattaaacgttctgatgccttaagcaccaatcacggccacaaggtcgttgagctggttgcagaaatggacggcattcagtacggtcgtagcggtataacactgggagtactcgtgccacatgtgggcgaaaccccaattgcataccgcaatgttcttcttcgtaagaacggtaataagggagccggtggtcatagctatggcatcgatctaaagtcttatgacttaggtgacgagcttggcactgatcccattgaagattatgaacaaaactggaacactaagcatggcagtggtgcactccgtgaactcactcgtgagctcaatggaggtgcagtcactcgctatgtcgacaacaatttctgtggcccagatgggtaccctcttgattgcatcaaagattttctcgcacgcgcgggcaagtcaatgtgcactctttccgaacaacttgattacatcgagtcgaagagaggtgtctactgctgccgtgaccatgagcatgaaattgcctggttcactgagcgctctgataagagctacgagcaccagacacccttcgaaattaagagtgccaagaaatttgacactttcaaaggggaatgcccaaagtttgtgtttcctcttaactcaaaagtcaaagtcattcaaccacgtgttgaaaagaaaaagactgagggtttcatggggcgtatacgctctgtgtaccctgttgcatctccacaggagtgtaacaatatgcacttgtctaccttgatgaaatgtaatcattgcgatgaagtttcatggcagacgtgcgactttctgaaagccacttgtgaacattgtggcactgaaaatttagttattgaaggacctactacatgtgggtacctacctactaatgctgtagtgaaaatgccatgtcctgcctgtcaagacccagagattggacctgagcatagtgttgcagattatcacaaccactcaaacattgaaactcgactccgcaagggaggtaggactagatgttttggaggctgtgtgtttgcctatgttggctgctataataagcgtgcctactgggttcctcgtgctagtgctgatattggctcaggccatactggcattactggtgacaatgtggagaccttgaatgaggatctccttgagatactgagtcgtgaacgtgttaacattaacattgttggcgattttcatttgaatgaagaggttgccatcattttggcatctttctctgcttctacaagtgcctttattgacactataaagagtcttgattacaagtctttcaaaaccattgttgagtcctgcggtaactataaagttaccaagggaaagcccgtaaaaggtgcttggaacattggacaacagagatcagttttaacaccactgtgtggttttccctcacaggctgctggtgttatcagatcaatttttgcgcgcacacttgatgcagcaaaccactcaattcctgatttgcaaagagcagctgtcaccatacttgatggtatttctgaacagtcattacgtcttgtcgacgccatggtttatacttcagacctgctcaccaacagtgtcattattatggcatatgtaactggtggtcttgtacaacagacttctcagtggttgtctaatcttttgggcactactgttgaaaaactcaggcctatctttgaatggattgaggcgaaacttagtgcaggagttgaatttctcaaggatgcttgggagattctcaaatttctcattacaggtgtttttgacatcgtcaagggtcaaatacaggttgcttcagataacatcaaggattgtgtaaaatgcttcattgatgttgttaacaaggcactcgaaatgtgcattgatcaagtcactatcgctggcgcaaagttgcgatcactcaacttaggtgaagtcttcatcgctcaaagcaagggactttaccgtcagtgtatacgtggcaaggagcagctgcaactactcatgcctcttaaggcaccaaaagaagtaacctttcttgaaggtgattcacatgacacagtacttacctctgaggaggttgttctcaagaacggtgaactcgaaacactcgagacgcccgttgatagcttcacaaatggagctatcgttggcacaccagtctgtgtaaatggcctcatgctcttagagattaaggacaaagaacaatactgcgcattgtctcctggtttactggctacaaacaatgtctttcgcttaaaagggggtgcaccaattaaaggtgtaacctttggagaagatactgtttgggaagttcaaggttacaagaatgtgagaatcacatttgagcttgatgaacgtgttgacaaagtgcttaatgaaaagtgctctgtctacactgttgaatccggtaccgaagttactgagtttgcatgtgttgtagcagaggctgttgtgaagactttacaaccagtttctgatctccttaccaacatgggtattgatcttgatgagtggagtgtagctacattctacttatttgatgatgctggtgaagaaaacttttcatcacgtatgtattgttccttttaccctccagatgaggaagaagaggacgatgcagagtgtgaggaagaagaaattgatgaaacctgtgaacatgagtacggtacagaggatgattatcaaggtctccctctggaatttggtgcctcagctgaaacagttcgagttgaggaagaagaagaggaagactggctggatgatactactgagcaatcagagattgagccagaaccagaacctacacctgaagaaccagttaatcagtttactggttatttaaaacttactgacaatgttgccattaaatgtgttgacatcgttaaggaggcacaaagtgctaatcctatggtgattgtaaatgctgctaacatacacctgaaacatggtggtggtgtagcaggtgcactcaacaaggcaaccaatggtgccatgcaaaaggagagtgatgattacattaagctaaatggccctcttacagtaggagggtcttgtttgctttctggacataatcttgctaagaagtgtctgcatgttgttggacctaacctaaatgcaggtgaggacatccagcttcttaaggcagcatatgaaaatttcaattcacaggacatcttacttgcaccattgttgtcagcaggcatatttggtgctaaaccacttcagtctttacaagtgtgcgtgcagacggttcgtacacaggtttatattgcagtcaatgacaaagctctttatgagcaggttgtcatggattatcttgataacctgaagcctagagtggaagcacctaaacaagaggagccaccaaacacagaagattccaaaactgaggagaaatctgtcgtacagaagcctgtcgatgtgaagccaaaaattaaggcctgcattgatgaggttaccacaacactggaagaaactaagtttcttaccaataagttactcttgtttgctgatatcaatggtaagctttaccatgattctcagaacatgcttagaggtgaagatatgtctttccttgagaaggatgcaccttacatggtaggtgatgttatcactagtggtgatatcacttgtgttgtaataccctccaaaaaggctggtggcactactgagatgctctcaagagctttgaagaaagtgccagttgatgagtatataaccacgtaccctggacaaggatgtgctggttatacacttgaggaagctaagactgctcttaagaaatgcaaatctgcattttatgtactaccttcagaagcacctaatgctaaggaagagattctaggaactgtatcctggaatttgagagaaatgcttgctcatgctgaagagacaagaaaattaatgcctatatgcatggatgttagagccataatggcaaccatccaacgtaagtataaaggaattaaaattcaagagggcatcgttgactatggtgtccgattcttcttttatactagtaaagagcctgtagcttctattattacgaagctgaactctctaaatgagccgcttgtcacaatgccaattggttatgtgacacatggttttaatcttgaagaggctgcgcgctgtatgcgttctcttaaagctcctgccgtagtgtcagtatcatcaccagatgctgttactacatataatggatacctcacttcgtcatcaaagacatctgaggagcactttgtagaaacagtttctttggctggctcttacagagattggtcctattcaggacagcgtacagagttaggtgttgaatttcttaagcgtggtgacaaaattgtgtaccacactctggagagccccgtcgagtttcatcttgacggtgaggttctttcacttgacaaactaaagagtctcttatccctgcgggaggttaagactataaaagtgttcacaactgtggacaacactaatctccacacacagcttgtggatatgtctatgacatatggacagcagtttggtccaacatacttggatggtgctgatgttacaaaaattaaacctcatgtaaatcatgagggtaagactttctttgtactacctagtgatgacacactacgtagtgaagctttcgagtactaccatactcttgatgagagttttcttggtaggtacatgtctgctttaaaccacacaaagaaatggaaatttcctcaagttggtggtttaacttcaattaaatgggctgataacaattgttatttgtctagtgttttattagcacttcaacagcttgaagtcaaattcaatgcaccagcacttcaagaggcttattatagagcccgtgctggtgatgctgctaacttttgtgcactcatactcgcttacagtaataaaactgttggcgagcttggtgatgtcagagaaactatgacccatcttctacagcatgctaatttggaatctgcaaagcgagttcttaatgtggtgtgtaaacattgtggtcagaaaactactaccttaacgggtgtagaagctgtgatgtatatgggtactctatcttatgataatcttaagacaggtgtttccattccatgtgtgtgtggtcgtgatgctacacaatatctagtacaacaagagtcttcttttgttatgatgtctgcaccacctgctgagtataaattacagcaaggtacattcttatgtgcgaatgagtacactggtaactatcagtgtggtcattacactcatataactgctaaggagaccctctatcgtattgacggagctcaccttacaaagatgtcagagtacaaaggaccagtgactgatgttttctacaaggaaacatcttacactacaaccatcaagcctgtgtcgtataaactcgatggagttacttacacagagattgaaccaaaattggatgggtattataaaaaggataatgcttactatacagagcagcctatagaccttgtaccaactcaaccattaccaaatgcgagttttgataatttcaaactcacatgttctaacacaaaatttgctgatgatttaaatcaaatgacaggcttcacaaagccagcttcacgagagctatctgtcacattcttcccagacttgaatggcgatgtagtggctattgactatagacactattcagcgagtttcaagaaaggtgctaaattactgcataagccaattgtttggcacattaaccaggctacaaccaagacaacgttcaaaccaaacacttggtgtttacgttgtctttggagtacaaagccagtagatacttcaaattcatttgaagttctggcagtagaagacacacaaggaatggacaatcttgcttgtgaaagtcaacaacccacctctgaagaagtagtggaaaatcctaccatacagaaggaagtcatagagtgtgacgtgaaaactaccgaagttgtaggcaatgtcatacttaaaccatcagatgaaggtgttaaagtaacacaagagttaggtcatgaggatcttatggctgcttatgtggaaaacacaagcattaccattaagaaacctaatgagctttcactagccttaggtttaaaaacaattgccactcatggtattgctgcaattaatagtgttccttggagtaaaattttggcttatgtcaaaccattcttaggacaagcagcaattacaacatcaaattgcgctaagagattagcacaacgtgtgtttaacaattatatgccttatgtgtttacattattgttccaattgtgtacttttactaaaagtaccaattctagaattagagcttcactacctacaactattgctaaaaatagtgttaagagtgttgctaaattatgtttggatgccggcattaattatgtgaagtcacccaaattttctaaattgttcacaatcgctatgtggctattgttgttaagtatttgcttaggttctctaatctgtgtaactgctgcttttggtgtactcttatctaattttggtgctccttcttattgtaatggcgttagagaattgtatcttaattcgtctaacgttactactatggatttctgtgaaggttcttttccttgcagcatttgtttaagtggattagactcccttgattcttatccagctcttgaaaccattcaggtgacgatttcatcgtacaagctagacttgacaattttaggtctggccgctgagtgggttttggcatatatgttgttcacaaaattcttttatttattaggtctttcagctataatgcaggtgttctttggctattttgctagtcatttcatcagcaattcttggctcatgtggtttatcattagtattgtacaaatggcacccgtttctgcaatggttaggatgtacatcttctttgcttctttctactacatatggaagagctatgttcatatcatggatggttgcacctcttcgacttgcatgatgtgctataagcgcaatcgtgccacacgcgttgagtgtacaactattgttaatggcatgaagagatctttctatgtctatgcaaatggaggccgtggcttctgcaagactcacaattggaattgtctcaattgtgacacattttgcactggtagtacattcattagtgatgaagttgctcgtgatttgtcactccagtttaaaagaccaatcaaccctactgaccagtcatcgtatattgttgatagtgttgctgtgaaaaatggcgcgcttcacctctactttgacaaggctggtcaaaagacctatgagagacatccgctctcccattttgtcaatttagacaatttgagagctaacaacactaaaggttcactgcctattaatgtcatagtttttgatggcaagtccaaatgcgacgagtctgcttctaagtctgcttctgtgtactacagtcagctgatgtgccaacctattctgttgcttgaccaagctcttgtatcagacgttggagatagtactgaagtttccgttaagatgtttgatgcttatgtcgacaccttttcagcaacttttagtgttcctatggaaaaacttaaggcacttgttgctacagctcacagcgagttagcaaagggtgtagctttagatggtgtcctttctacattcgtgtcagctgcccgacaaggtgttgttgataccgatgttgacacaaaggatgttattgaatgtctcaaactttcacatcactctgacttagaagtgacaggtgacagttgtaacaatttcatgctcacctataataaggttgaaaacatgacgcccagagatcttggcgcatgtattgactgtaatgcaaggcatatcaatgcccaagtagcaaaaagtcacaatgtttcactcatctggaatgtaaaagactacatgtctttatctgaacagctgcgtaaacaaattcgtagtgctgccaagaagaacaacataccttttagactaacttgtgctacaactagacaggttgtcaatgtcataactactaaaatctcactcaagggtggtaagattgttagtacttgttttaaacttatgcttaaggccacattattgtgcgttcttgctgcattggtttgttatatcgttatgccagtacatacattgtcaatccatgatggttacacaaatgaaatcattggttacaaagccattcaggatggtgtcactcgtgacatcatttctactgatgattgttttgcaaataaacatgctggttttgacgcatggtttagccagcgtggtggttcatacaaaaatgacaaaagctgccctgtagtagctgctatcattacaagagagattggtttcatagtgcctggcttaccgggtactgtgctgagagcaatcaatggtgacttcttgcattttctacctcgtgtttttagtgctgttggcaacatttgctacacaccttccaaactcattgagtatagtgattttgctacctctgcttgcgttcttgctgctgagtgtacaatttttaaggatgctatgggcaaacctgtgccatattgttatgacactaatttgctagagggttctatttcttatagtgagcttcgtccagacactcgttatgtgcttatggatggttccatcatacagtttcctaacacttacctggagggttctgttagagtagtaacaacttttgatgctgagtactgtagacatggtacatgcgaaaggtcagaagtaggtatttgcctatctaccagtggtagatgggttcttaataatgagcattacagagctctatcaggagttttctgtggtgttgatgcgatgaatctcatagctaacatctttactcctcttgtgcaacctgtgggtgctttagatgtgtctgcttcagtagtggctggtggtattattgccatattggtgacttgtgctgcctactactttatgaaattcagacgtgtttttggtgagtacaaccatgttgttgctgctaatgcacttttgtttttgatgtctttcactatactctgtctggtaccagcttacagctttctgccgggagtctactcagtcttttacttgtacttgacattctatttcaccaatgatgtttcattcttggctcaccttcaatggtttgccatgttttctcctattgtgcctttttggataacagcaatctatgtattctgtatttctctgaagcactgccattggttctttaacaactatcttaggaaaagagtcatgtttaatggagttacatttagtaccttcgaggaggctgctttgtgtacctttttgctcaacaaggaaatgtacctaaaattgcgtagcgagacactgttgccacttacacagtataacaggtatcttgctctatataacaagtacaagtatttcagtggagccttagatactaccagctatcgtgaagcagcttgctgccacttagcaaaggctctaaatgactttagcaactcaggtgctgatgttctctaccaaccaccacagacatcaatcacttctgctgttctgcagagtggttttaggaaaatggcattcccgtcaggcaaagttgaagggtgcatggtacaagtaacctgtggaactacaactcttaatggattgtggttggatgacacagtatactgtccaagacatgtcatttgcacagcagaagacatgcttaatcctaactatgaagatctgctcattcgcaaatccaaccatagctttcttgttcaggctggcaatgttcaacttcgtgttattggccattctatgcaaaattgtctgcttaggcttaaagttgatacttctaaccctaagacacccaagtataaatttgtccgtatccaacctggtcaaacattttcagttctagcatgctacaatggttcaccatctggtgtttatcagtgtgccatgagacctaatcataccattaaaggttctttccttaatggatcatgtggtagtgttggttttaacattgattatgattgcgtgtctttctgctatatgcatcatatggagcttccaacaggagtacacgctggtactgacttagaaggtaaattctatggtccatttgttgacagacaaactgcacaggctgcaggtacagacacaaccataacattaaatgttttggcatggctgtatgctgctgttatcaatggtgataggtggtttcttaatagattcaccactactttgaatgactttaaccttgtggcaatgaagtacaactatgaacctttgacacaagatcatgttgacatattgggacctctttctgctcaaacaggaattgccgtcttagatatgtgtgctgctttgaaagagctgctgcagaatggtatgaatggtcgtactatccttggtagcactattttagaagatgagtttacaccatttgatgttgttagacaatgctctggtgttaccttccaaggtaagttcaagaaaattgttaagggcactcatcattggatgcttttaactttcttgacatcactattgattcttgttcaaagtacacagtggtcactgtttttctttgtttacgagaatgctttcttgccatttactcttggtattatggcaattgctgcatgtgctatgctgcttgttaagcataagcacgcattcttgtgcttgtttctgttaccttctcttgcaacagttgcttactttaatatggtctacatgcctgctagctgggtgatgcgtatcatgacatggcttgaattggctgacactagcttgtctggttataggcttaaggattgtgttatgtatgcttcagctttagttttgcttattctcatgacagctcgcactgtttatgatgatgctgctagacgtgtttggacactgatgaatgtcattacacttgtttacaaagtctactatggtaatgctttagatcaagctatttccatgtgggccttagttatttctgtaacctctaactattctggtgtcgttacgactattatgtttttagctagagctatagtgtttgtgtgtgttgagtattacccattgttatttattactggcaacaccttacagtgtatcatgcttgtttattgtttcttaggctattgttgctgctgctactttggccttttctgtttactcaaccgttacttcaggcttactcttggtgtttatgactacttggtctctacacaagaatttaggtatatgaactcccaggggcttttgcctcctaagagtagtattgatgctttcaagcttaacattaagttgttgggtattggaggtaaaccatgtatcaaggttgctactgtacagtctaaaatgtctgacgtaaagtgcacatctgtggtactgctctcggttcttcaacaacttagagtagagtcatcttctaaattgtgggcacaatgtgtacaactccacaatgatattcttcttgcaaaagacacaactgaagctttcgagaagatggtttctcttttgtctgttttgctatccatgcagggtgctgtagacattaataggttgtgcgaggaaatgctcgataaccgtgctactcttcaggctattgcttcagaatttagttctttaccatcatatgccgcttatgccactgcccaggaggcctatgagcaggctgtagctaatggtgattctgaagtcgttctcaaaaagttaaagaaatctttgaatgtggctaaatctgagtttgaccgtgatgctgccatgcaacgcaagttggaaaagatggcagatcaggctatgacccaaatgtacaaacaggcaagatctgaggacaagagggcaaaagtaactagtgctatgcaaacaatgctcttcactatgcttaggaagcttgataatgatgcacttaacaacattatcaacaatgcgcgtgatggttgtgttccactcaacatcataccattgactacagcagccaaactcatggttgttgtccctgattatggtacctacaagaacacttgtgatggtaacacctttacatatgcatctgcactctgggaaatccagcaagttgttgatgcggatagcaagattgttcaacttagtgaaattaacatggacaattcaccaaatttggcttggcctcttattgttacagctctaagagccaactcagctgttaaactacagaataatgaactgagtccagtagcactacgacagatgtcctgtgcggctggtaccacacaaacagcttgtactgatgacaatgcacttgcctactataacaattcgaagggaggtaggtttgtgctggcattactatcagaccaccaagatctcaaatgggctagattccctaagagtgatggtacaggtacaatttacacagaactggaaccaccttgtaggtttgttacagacacaccaaaagggcctaaagtgaaatacttgtacttcatcaaaggcttaaacaacctaaatagaggtatggtgctgggcagtttagctgctacagtacgtcttcaggctggaaatgctacagaagtacctgccaattcaactgtgctttccttctgtgcttttgcagtagaccctgctaaagcatataaggattacctagcaagtggaggacaaccaatcaccaactgtgtgaagatgttgtgtacacacactggtacaggacaggcaattactgtaacaccagaagctaacatggaccaagagtcctttggtggtgcttcatgttgtctgtattgtagatgccacattgaccatccaaatcctaaaggattctgtgacttgaaaggtaagtacgtccaaatacctaccacttgtgctaatgacccagtgggttttacacttagaaacacagtctgtaccgtctgcggaatgtggaaaggttatggctgtagttgtgaccaactccgcgaacccttgatgcagtctgcggatgcatcaacgtttttaaacgggtttgcggtgtaagtgcagcccgtcttacaccgtgcggcacaggcactagtactgatgtcgtctacagggcttttgatatttacaacgaaaaagttgctggttttgcaaagttcctaaaaactaattgctgtcgcttccaggagaaggatgaggaaggcaatttattagactcttactttgtagttaagaggcatactatgtctaactaccaacatgaagagactatttataacttggttaaagattgtccagcggttgctgtccatgactttttcaagtttagagtagatggtgacatggtaccacatatatcacgtcagcgtctaactaaatacacaatggctgatttagtctatgctctacgtcattttgatgagggtaattgtgatacattaaaagaaatactcgtcacatacaattgctgtgatgatgattatttcaataagaaggattggtatgacttcgtagagaatcctgacatcttacgcgtatatgctaacttaggtgagcgtgtacgccaatcattattaaagactgtacaattctgcgatgctatgcgtgatgcaggcattgtaggcgtactgacattagataatcaggatcttaatgggaactggtacgatttcggtgatttcgtacaagtagcaccaggctgcggagttcctattgtggattcatattactcattgctgatgcccatcctcactttgactagggcattggctgctgagtcccatatggatgctgatctcgcaaaaccacttattaagtgggatttgctgaaatatgattttacggaagagagactttgtctcttcgaccgttattttaaatattgggaccagacataccatcccaattgtattaactgtttggatgataggtgtatccttcattgtgcaaactttaatgtgttattttctactgtgtttccacctacaagttttggaccactagtaagaaaaatatttgtagatggtgttccttttgttgtttcaactggataccattttcgtgagttaggagtcgtacataatcaggatgtaaacttacatagctcgcgtctcagtttcaaggaacttttagtgtatgctgctgatccagctatgcatgcagcttctggcaatttattgctagataaacgcactacatgcttttcagtagctgcactaacaaacaatgttgcttttcaaactgtcaaacccggtaattttaataaagacttttatgactttgctgtgtctaaaggtttctttaaggaaggaagttctgttgaactaaaacacttcttctttgctcaggatggcaacgctgctatcagtgattatgactattatcgttataatctgccaacaatgtgtgatatcagacaactcctattcgtagttgaagttgttgataaatactttgattgttacgatggtggctgtattaatgccaaccaagtaatcgttaacaatctggataaatcagctggtttcccatttaataaatggggtaaggctagactttattatgactcaatgagttatgaggatcaagatgcacttttcgcgtatactaagcgtaatgtcatccctactataactcaaatgaatcttaagtatgccattagtgcaaagaatagagctcgcaccgtagctggtgtctctatctgtagtactatgacaaatagacagtttcatcagaaattattgaagtcaatagccgccactagaggagctactgtggtaattggaacaagcaagttttacggtggctggcataatatgttaaaaactgtttacagtgatgtagaaactccacaccttatgggttgggattatccaaaatgtgacagagccatgcctaacatgcttaggataatggcctctcttgttcttgctcgcaaacataacacttgctgtaacttatcacaccgtttctacaggttagctaacgagtgtgcgcaagtattaagtgagatggtcatgtgtggcggctcactatatgttaaaccaggtggaacatcatccggtgatgctacaactgcttatgctaatagtgtctttaacatttgtcaagctgttacagccaatgtaaatgcacttctttcaactgatggtaataagatagctgacaagtatgtccgcaatctacaacacaggctctatgagtgtctctatagaaatagggatgttgatcatgaattcgtggatgagttttacgcttacctgcgtaaacatttctccatgatgattctttctgatgatgccgttgtgtgctataacagtaactatgcggctcaaggtttagtagctagcattaagaactttaaggcagttctttattatcaaaataatgtgttcatgtctgaggcaaaatgttggactgagactgaccttactaaaggacctcacgaattttgctcacagcatacaatgctagttaaacaaggagatgattacgtgtacctgccttacccagatccatcaagaatattaggcgcaggctgttttgtcgatgatattgtcaaaacagatggtacacttatgattgaaaggttcgtgtcactggctattgatgcttacccacttacaaaacatcctaatcaggagtatgctgatgtctttcacttgtatttacaatacattagaaagttacatgatgagcttactggccacatgttggacatgtattccgtaatgctaactaatgataacacctcacggtactgggaacctgagttttatgaggctatgtacacaccacatacagtcttgcaggctgtaggtgcttgtgtattgtgcaattcacagacttcacttcgttgcggtgcctgtattaggagaccattcctatgttgcaagtgctgctatgaccatgtcatttcaacatcacacaaattagtgttgtctgttaatccctatgtttgcaatgccccaggttgtgatgtcactgatgtgacacaactgtatctaggaggtatgagctattattgcaagtcacataagcctcccattagttttccattatgtgctaatggtcaggtttttggtttatacaaaaacacatgtgtaggcagtgacaatgtcactgacttcaatgcgatagcaacatgtgattggactaatgctggcgattacatacttgccaacacttgtactgagagactcaagcttttcgcagcagaaacgctcaaagccactgaggaaacatttaagctgtcatatggtattgccactgtacgcgaagtactctctgacagagaattgcatctttcatgggaggttggaaaacctagaccaccattgaacagaaactatgtctttactggttaccgtgtaactaaaaatagtaaagtacagattggagagtacacctttgaaaaaggtgactatggtgatgctgttgtgtacagaggtactacgacatacaagttgaatgttggtgattactttgtgttgacatctcacactgtaatgccacttagtgcacctactctagtgccacaagagcactatgtgagaattactggcttgtacccaacactcaacatctcagatgagttttctagcaatgttgcaaattatcaaaaggtcggcatgcaaaagtactctacactccaaggaccacctggtactggtaagagtcattttgccatcggacttgctctctattacccatctgctcgcatagtgtatacggcatgctctcatgcagctgttgatgccctatgtgaaaaggcattaaaatatttgcccatagataaatgtagtagaatcatacctgcgcgtgcgcgcgtagagtgttttgataaattcaaagtgaattcaacactagaacagtatgttttctgcactgtaaatgcattgccagaaacaactgctgacattgtagtctttgatgaaatctctatggctactaattatgacttgagtgttgtcaatgctagacttcgtgcaaaacactacgtctatattggcgatcctgctcaattaccagccccccgcacattgctgactaaaggcacactagaaccagaatattttaattcagtgtgcagacttatgaaaacaataggtccagacatgttccttggaacttgtcgccgttgtcctgctgaaattgttgacactgtgagtgctttagtttatgacaataagctaaaagcacacaaggataagtcagctcaatgcttcaaaatgttctacaaaggtgttattacacatgatgtttcatctgcaatcaacagacctcaaataggcgttgtaagagaatttcttacacgcaatcctgcttggagaaaagctgtttttatctcaccttataattcacagaacgctgtagcttcaaaaatcttaggattgcctacgcagactgttgattcatcacagggttctgaatatgactatgtcatattcacacaaactactgaaacagcacactcttgtaatgtcaaccgcttcaatgtggctatcacaagggcaaaaattggcattttgtgcataatgtctgatagagatctttatgacaaactgcaatttacaagtctagaaataccacgtcgcaatgtggctacattacaagcagaaaatgtaactggactttttaaggactgtagtaagatcattactggtcttcatcctacacaggcacctacacacctcagcgttgatataaagttcaagactgaaggattatgtgttgacataccaggcataccaaaggacatgacctaccgtagactcatctctatgatgggtttcaaaatgaattaccaagtcaatggttaccctaatatgtttatcacccgcgaagaagctattcgtcacgttcgtgcgtggattggctttgatgtagagggctgtcatgcaactagagatgctgtgggtactaacctacctctccagctaggattttctacaggtgttaacttagtagctgtaccgactggttatgttgacactgaaaataacacagaattcaccagagttaatgcaaaacctccaccaggtgaccagtttaaacatcttataccactcatgtataaaggcttgccctggaatgtagtgcgtattaagatagtacaaatgctcagtgatacactgaaaggattgtcagacagagtcgtgttcgtcctttgggcgcatggctttgagcttacatcaatgaagtactttgtcaagattggacctgaaagaacgtgttgtctgtgtgacaaacgtgcaacttgcttttctacttcatcagatacttatgcctgctggaatcattctgtgggttttgactatgtctataacccatttatgattgatgttcagcagtggggctttacgggtaaccttcagagtaaccatgaccaacattgccaggtacatggaaatgcacatgtggctagttgtgatgctatcatgactagatgtttagcagtccatgagtgctttgttaagcgcgttgattggtctgttgaataccctattataggagatgaactgagggttaattctgcttgcagaaaagtacaacacatggttgtgaagtctgcattgcttgctgataagtttccagttcttcatgatataggaaatccaaaggctatcaagtgtgtgcctcaggctgaagtagaatggaagttctacgatgttcagccatgtagtgacaaagcttacaaaatagaggaactcttctattcttatgctatacatcacgataaattcactgatggtgtttgtttgttttggaattgtaacgttgatcgttacccagccaatgcaattgtgtgtaggtttgacacaagagtcttgtcaaacttgaacttaccaggctgtgatggtggtagtttgtatgtgaataagcatgcattccacactccagctttcgataaaagtgcatttactaatttaaagcaattgcctttcttttactattctgatagtccttgtgagtctcatggcaaacaagtagtgtcggatattgattatgttccactcaaatctgctacgtgtattacacgatgcaatttaggtggtgctgtttgcagacaccatgcaaatgagtaccgacagtacttggatgcatataatatgatgatttctgctggatttagcctatggatttacaaacaatttgatacttataacctgtggaatacatttaccaggttacagagtttagaaaatgtggcttataatgttgttaataaaggacactttgatggacacgccggcgaagcacctgtttccatcattaataatgctgtttacacaaaggtagatggtattgatgtggagatctttgaaaataagacaacacttcctgttaatgttgcatttgagctttgggctaagcgtaacattaaaccagtgccagagattaagatactcaataatttgggtgttgatatcgctgctaatactgtaatctgggactacaaaagagaagccccagcacatgtatctacaataggtgtctgcacaatgactgacattgccaagaaacctactgagagtgcttgttcttcacttactgtcttgtttgatggtagagtggaaggacaggtagacctttttagaaacgcccgtaatggtgttttaataacagaaggttcagtcaaaggtctaacaccttcaaagggaccagcacaagctagcgtcaatggagtcacattaattggagaatcagtaaaaacacagtttaactactttaagaaagtagacggcattattcaacagttgcctgaaacctactttactcagagcagagacttagaggattttaagcccagatcacaaatggaaactgactttctcgagctcgctatggatgaattcatacagcgatataagctcgagggctatgccttcgaacacatcgtttatggagatttcagtcatggacaacttggcggtcttcatttaatgataggcttagccaagcgctcacaagattcaccacttaaattagaggattttatccctatggacagcacagtgaaaaattacttcataacagatgcgcaaacaggttcatcaaaatgtgtgtgttctgtgattgatcttttacttgatgactttgtcgagataataaagtcacaagatttgtcagtgatttcaaaagtggtcaaggttacaattgactatgctgaaatttcattcatgctttggtgtaaggatggacatgttgaaaccttctacccaaaactacaagcaagtcaagcgtggcaaccaggtgttgcgatgcctaacttgtacaagatgcaaagaatgcttcttgaaaagtgtgaccttcagaattatggtgaaaatgctgttataccaaaaggaataatgatgaatgtcgcaaagtatactcaactgtgtcaatacttaaatacacttactttagctgtaccctacaacatgagagttattcactttggtgctggctctgataaaggagttgcaccaggtacagctgtgctcagacaatggttgccaactggcacactacttgtcgattcagatcttaatgacttcgtctccgacgcagattctactttaattggagactgtgtaacagtacatacggctaataaatgggaccttattattagcgatatgtatgaccctaggaccaaacatgtgacaaaagagaatgactctaaagaagggtttttcacttatctgtgtggatttataaagcaaaaactagccctgggtggttctatagctgtaaagataacagagcattcttggaatgctgacctttacaagcttatgggccatttctcatggtggacagcttttgttacaaatgtaaatgcatcatcatcggaagcatttttaattggggctaactatcttggcaagccgaaggaacaaattgatggctataccatgcatgctaactacattttctggaggaacacaaatcctatccagttgtcttcctattcactctttgacatgagcaaatttcctcttaaattaagaggaactgctgtaatgtctcttaaggagaatcaaatcaatgatatgatttattctcttctggaaaaaggtaggcttatcattagagaaaacaacagagttgtggtttcaagtgatattcttgttaacaactaaacgaacatgtttattttcttattatttcttactctcactagtggtagtgaccttgaccggtgcaccacttttgatgatgttcaagctcctaattacactcaacatacttcatctatgaggggggtttactatcctgatgaaatttttagatcagacactctttatttaactcaggatttatttcttccattttattctaatgttacagggtttcatactattaatcatacgtttggcaaccctgtcataccttttaaggatggtatttattttgctgccacagagaaatcaaatgttgtccgtggttgggtttttggttctaccatgaacaacaagtcacagtcggtgattattattaacaattctactaatgttgttatacgagcatgtaactttgaattgtgtgacaaccctttctttgctgtttctaaacccatgggtacacagacacatactatgatattcgataatgcatttaattgcactttcgagtacatatctgatgccttttcgcttgatgtttcagaaaagtcaggtaattttaaacacttacgagagtttgtgtttaaaaataaagatgggtttctctatgtttataagggctatcaacctatagatgtagttcgtgatctaccttctggttttaacactttgaaacctatttttaagttgcctcttggtattaacattacaaattttagagccattcttacagccttttcacctgctcaagacatttggggcacgtcagctgcagcctattttgttggctatttaaagccaactacatttatgctcaagtatgatgaaaatggtacaatcacagatgctgttgattgttctcaaaatccacttgctgaactcaaatgctctgttaagagctttgagattgacaaaggaatttaccagacctctaatttcagggttgttccctcaggagatgttgtgagattccctaatattacaaacttgtgtccttttggagaggtttttaatgctactaaattcccttctgtctatgcatgggagagaaaaaaaatttctaattgtgttgctgattactctgtgctctacaactcaacatttttttcaacctttaagtgctatggcgtttctgccactaagttgaatgatctttgcttctccaatgtctatgcagattcttttgtagtcaagggagatgatgtaagacaaatagcgccaggacaaactggtgttattgctgattataattataaattgccagatgatttcatgggttgtgtccttgcttggaatactaggaacattgatgctacttcaactggtaattataattataaatataggtatcttagacatggcaagcttaggccctttgagagagacatatctaatgtgcctttctcccctgatggcaaaccttgcaccccacctgctcttaattgttattggccattaaatgattatggtttttacaccactactggcattggctaccaaccttacagagttgtagtactttcttttgaacttttaaatgcaccggccacggtttgtggaccaaaattatccactgaccttattaagaaccagtgtgtcaattttaattttaatggactcactggtactggtgtgttaactccttcttcaaagagatttcaaccatttcaacaatttggccgtgatgtttctgatttcactgattccgttcgagatcctaaaacatctgaaatattagacatttcaccttgctcttttgggggtgtaagtgtaattacacctggaacaaatgcttcatctgaagttgctgttctatatcaagatgttaactgcactgatgtttctacagcaattcatgcagatcaactcacaccagcttggcgcatatattctactggaaacaatgtattccagactcaagcaggctgtcttataggagctgagcatgtcgacacttcttatgagtgcgacattcctattggagctggcatttgtgctagttaccatacagtttctttattacgtagtactagccaaaaatctattgtggcttatactatgtctttaggtgctgatagttcaattgcttactctaataacaccattgctatacctactaacttttcaattagcattactacagaagtaatgcctgtttctatggctaaaacctccgtagattgtaatatgtacatctgcggagattctactgaatgtgctaatttgcttctccaatatggtagcttttgcacacaactaaatcgtgcactctcaggtattgctgctgaacaggatcgcaacacacgtgaagtgttcgctcaagtcaaacaaatgtacaaaaccccaactttgaaatattttggtggttttaatttttcacaaatattacctgaccctctaaagccaactaagaggtcttttattgaggacttgctctttaataaggtgacactcgctgatgctggcttcatgaagcaatatggcgaatgcctaggtgatattaatgctagagatctcatttgtgcgcagaagttcaatggacttacagtgttgccacctctgctcactgatgatatgattgctgcctacactgctgctctagttagtggtactgccactgctggatggacatttggtgctggcgctgctcttcaaataccttttgctatgcaaatggcatataggttcaatggcattggagttacccaaaatgttctctatgagaaccaaaaacaaatcgccaaccaatttaacaaggcgattagtcaaattcaagaatcacttacaacaacatcaactgcattgggcaagctgcaagacgttgttaaccagaatgctcaagcattaaacacacttgttaaacaacttagctctaattttggtgcaatttcaagtgtgctaaatgatatcctttcgcgacttgataaagtcgaggcggaggtacaaattgacaggttaattacaggcagacttcaaagccttcaaacctatgtaacacaacaactaatcagggctgctgaaatcagggcttctgctaatcttgctgctactaaaatgtctgagtgtgttcttggacaatcaaaaagagttgacttttgtggaaagggctaccaccttatgtccttcccacaagcagccccgcatggtgttgtcttcctacatgtcacgtatgtgccatcccaggagaggaacttcaccacagcgccagcaatttgtcatgaaggcaaagcatacttccctcgtgaaggtgtttttgtgtttaatggcacttcttggtttattacacagaggaacttcttttctccacaaataattactacagacaatacatttgtctcaggaaattgtgatgtcgttattggcatcattaacaacacagtttatgatcctctgcaacctgagcttgactcattcaaagaagagctggacaagtacttcaaaaatcatacatcaccagatgttgattttggcgacatttcaggcattaacgcttctgtcgtcaacattcaaaaagaaattgaccgcctcaatgaggtcgctaaaaatttaaatgaatcactcattgaccttcaagaattgggaaaatatgagcaatatattaaatggccttggtatgtttggctcggcttcattgctggactaattgccatcgtcatggttacaatcttgctttgttgcatgactagttgttgcagttgcctcaagggtgcatgctcttgtggttcttgctgcaagtttgatgaggatgactctgagccagttctcaagggtgtcaaattacattacacataaacgaacttatggatttgtttatgagattttttactcttggatcaattactgcacagccagtaaaaattgacaatgcttctcctgcaagtactgttcatgctacagcaacgataccgctacaagcctcactccctttcggatggcttgttattggcgttgcatttcttgctgtttttcagagcgctaccaaaataattgcgctcaataaaagatggcagctagccctttataagggcttccagttcatttgcaatttactgctgctatttgttaccatctattcacatcttttgcttgtcgctgcaggtatggaggcgcaatttttgtacctctatgccttgatatattttctacaatgcatcaacgcatgtagaattattatgagatgttggctttgttggaagtgcaaatccaagaacccattactttatgatgccaactactttgtttgctggcacacacataactatgactactgtataccatataacagtgtcacagatacaattgtcgttactgaaggtgacggcatttcaacaccaaaactcaaagaagactaccaaattggtggttattctgaggataggcactcaggtgttaaagactatgtcgttgtacatggctatttcaccgaagtttactaccagcttgagtctacacaaattactacagacactggtattgaaaatgctacattcttcatctttaacaagcttgttaaagacccaccgaatgtgcaaatacacacaatcgacggctcttcaggagttgctaatccagcaatggatccaatttatgatgagccgacgacgactactagcgtgcctttgtaagcacaagaaagtgagtacgaacttatgtactcattcgtttcggaagaaacaggtacgttaatagttaatagcgtacttctttttcttgctttcgtggtattcttgctagtcacactagccatccttactgcgcttcgattgtgtgcgtactgctgcaatattgttaacgtgagtttagtaaaaccaacggtttacgtctactcgcgtgttaaaaatctgaactcttctgaaggagttcctgatcttctggtctaaacgaactaactattattattattctgtttggaactttaacattgcttatcatggcagacaacggtactattaccgttgaggagcttaaacaactcctggaacaatggaacctagtaataggtttcctattcctagcctggattatgttactacaatttgcctattctaatcggaacaggtttttgtacataataaagcttgttttcctctggctcttgtggccagtaacacttgcttgttttgtgcttgctgttgtctacagaattaattgggtgactggcgggattgcgattgcaatggcttgtattgtaggcttgatgtggcttagctacttcgttgcttccttcaggctgtttgctcgtacccgctcaatgtggtcattcaacccagaaacaaacattcttctcaatgtgcctctccgggggacaattgtgaccagaccgctcatggaaagtgaacttgtcattggtgctgtgatcattcgtggtcacttgcgaatggccggacactccctagggcgctgtgacattaaggacctgccaaaagagatcactgtggctacatcacgaacgctttcttattacaaattaggagcgtcgcagcgtgtaggcactgattcaggttttgctgcatacaaccgctaccgtattggaaactataaattaaatacagaccacgccggtagcaacgacaatattgctttgctagtacagtaagtgacaacagatgtttcatcttgttgacttccaggttacaatagcagagatattgattatcattatgaggactttcaggattgctatttggaatcttgacgttataataagttcaatagtgagacaattatttaagcctctaactaagaagaattattcggagttagatgatgaagaacctatggagttagattatccataaaacgaacatgaaaattattctcttcctgacattgattgtatttacatcttgcgagctatatcactatcaggagtgtgttagaggtacgactgtactactaaaagaaccttgcccatcaggaacatacgagggcaattcaccatttcaccctcttgctgacaataaatttgcactaacttgcactagcacacactttgcttttgcttgtgctgacggtactcgacatacctatcagctgcgtgcaagatcagtttcaccaaaacttttcatcagacaagaggaggttcaacaagagctctactcgccactttttctcattgttgctgctctagtatttttaatactttgcttcaccattaagagaaagacagaatgaatgagctcactttaattgacttctatttgtgctttttagcctttctgctattccttgttttaataatgcttattatattttggttttcactcgaaatccaggatctagaagaaccttgtaccaaagtctaaacgaacatgaaacttctcattgttttgacttgtatttctctatgcagttgcatatgcactgtagtacagcgctgtgcatctaataaacctcatgtgcttgaagatccttgtaaggtacaacactaggggtaatacttatagcactgcttggctttgtgctctaggaaaggttttaccttttcatagatggcacactatggttcaaacatgcacacctaatgttactatcaactgtcaagatccagctggtggtgcgcttatagctaggtgttggtaccttcatgaaggtcaccaaactgctgcatttagagacgtacttgttgttttaaataaacgaacaaattaaaatgtctgataatggaccccaatcaaaccaacgtagtgccccccgcattacatttggtggacccacagattcaactgacaataaccagaatggaggacgcaatggggcaaggccaaaacagcgccgaccccaaggtttacccaataatattgcgtcttggttcacagctctcactcagcatggcaaggaggaacttagattccctcgaggccagggcgttccaatcaacaccaatagtggtccagatgaccaaattggctactaccgaagagctacccgacgagttcgtggtggtgacggcaaaatgaaagagctcagccccagatggtacttctattacctaggaactggcccagaagcttcacttccctacggcgctaacaaagaaggcatcgtatgggttgcaactgagggagccttgaatacacccaaagaccacattggcacccgcaatcctaataacaatgctgccaccgtgctacaacttcctcaaggaacaacattgccaaaaggcttctacgcagagggaagcagaggcggcagtcaagcctcttctcgctcctcatcacgtagtcgcggtaattcaagaaattcaactcctggcagcagtaggggaaattctcctgctcgaatggctagcggaggtggtgaaactgccctcgcgctattgctgctagacagattgaaccagcttgagagcaaagtttctggtaaaggccaacaacaacaaggccaaactgtcactaagaaatctgctgctgaggcatctaaaaagcctcgccaaaaacgtactgccacaaaacagtacaacgtcactcaagcatttgggagacgtggtccagaacaaacccaaggaaatttcggggaccaagacctaatcagacaaggaactgattacaaacattggccgcaaattgcacaatttgctccaagtgcctctgcattctttggaatgtcacgcattggcatggaagtcacaccttcgggaacatggctgacttatcatggagccattaaattggatgacaaagatccacaattcaaagacaacgtcatactgctgaacaagcacattgacgcatacaaaacattcccaccaacagagcctaaaaaggacaaaaagaaaaagactgatgaagctcagcctttgccgcagagacaaaagaagcagcccactgtgactcttcttcctgcggctgacatggatgatttctccagacaacttcaaaattccatgagtggagcttctgctgattcaactcaggcataaacactcatgatgaccacacaaggcagatgggctatgtaaacgttttcgcaattccgtttacgatacatagtctactcttgtgcagaatgaattctcgtaactaaacagcacaagtaggtttagttaactttaatctcacatagcaatctttaatcaatgtgtaacattagggaggacttgaaagagccaccacattttcatcgaggccacgcggagtacgatcgagggtacagtgaataatgctagggagagctgcctatatggaagagccctaatgtgtaaaattaattttagtagtgctatccccatgtgattttacacattagggctcttccatatagg

SEQ ID NO: 29817 - DNA, 29741 bp, SARS Coronavirus
atattaggtttttacctacccaggaaaagccaaccaacctcgatctcttgtagatctgttctctaaacgaactttaaaatctgtgtagctgtcgctcggctgcatgcctagtgcacctacgcagtataaacaataataaattttactgtcgttgacaagaaacgagtaactcgtccctcttctgcagactgcttacggtttcgtccgtgttgcagtcgatcatcagcatacctaggtttcgtccgggtgtgaccgaaaggtaagatggagagccttgttcttggtgtcaacgagaaaacacacgtccaactcagtttgcctgtccttcaggttagagacgtgctagtgcgtggcttcggggactctgtggaagaggccctatcggaggcacgtgaacacctcaaaaatggcacttgtggtctagtagagctggaaaaaggcgtactgccccagcttgaacagccctatgtgttcattaaacgttctgatgccttaagcaccaatcacggccacaaggtcgttgagctggttgcagaaatggacggcattcagtacggtcgtagcggtataacactgggagtactcgtgccacatgtgggcgaaaccccaattgcataccgcaatgttcttcttcgtaagaacggtaataagggagccggtggtcatagctatggcatcgatctaaagtcttatgacttaggtgacgagcttggcactgatcccattgaagattatgaacaaaactggaacactaagcatggcagtggtgcactccgtgaactcactcgtgagctcaatggaggtgcagtcactcgctatgtcgacaacaatttctgtggcccagatgggtaccctcttgattgcatcaaagattttctcgcacgcgcgggcaagtcaatgtgcactctttccgaacaacttgattacatcgagtcgaagagaggtgtctactgctgccgtgaccatgagcatgaaattgcctggttcactgagcgctctgataagagctacgagcaccagacacccttcgaaattaagagtgccaagaaatttgacactttcaaaggggaatgcccaaagtttgtgtttcctcttaactcaaaagtcaaagtcattcaaccacgtgttgaaaagaaaaagactgagggtttcatggggcgtatacgctctgtgtaccctgttgcatctccacaggagtgtaacaatatgcacttgtctaccttgatgaaatgtaatcattgcgatgaagtttcatggcagacgtgcgactttctgaaagccacttgtgaacattgtggcactgaaaatttagttattgaaggacctactacatgtgggtacctacctactaatgctgtagtgaaaatgccatgtcctgcctgtcaagacccagagattggacctgagcatagtgttgcagattatcacaaccactcaaacattgaaactcgactccgcaagggaggtaggactagatgttttggaggctgtgtgtttgcctatgttggctgctataataagcgtgcctactgggttcctcgtgctagtgctgatattggctcaggccatactggcattactggtgacaatgtggagaccttgaatgaggatctccttgagatactgagtcgtgaacgtgttaacattaacattgttggcgattttcatttgaatgaagaggttgccatcattttggcatctttctctgcttctacaagtgcctttattgacactataaagagtcttgattacaagtctttcaaaaccattgttgagtcctgcggtaactataaagttaccaagggaaagcccgtaaaaggtgcttggaacattggacaacagagatcagttttaacaccactgtgtggttttccctcacaggctgctggtgttatcagatcaatttttgcgcgcacacttgatgcagcaaaccactcaattcctgatttgcaaagagcagctgtcaccatacttgatggtatttctgaacagtcattacgtcttgtcgacgccatggtttatacttcagacctgctcaccaacagtgtcattattatggcatatgtaactggtggtcttgtacaacagacttctcagtggttgtctaatcttttgggcactactgttgaaaaactcaggcctatctttgaatggattgaggcgaaacttagtgcaggagttgaatttctcaaggatgcttgggagattctcaaatttctcattacaggtgtttttgacatcgtcaagggtcaaatacaggttgcttcagataacatcaaggattgtgtaaaatgcttcattgatgttgttaacaaggcactcgaaatgtgcattgatcaagtcactatcgctggcgcaaagttgcgatcactcaacttaggtgaagtcttcatcgctcaaagcaagggactttaccgtcagtgtatacgtggcaaggagcagctgcaactactcatgcctcttaaggcaccaaaagaagtaacctttcttgaaggtgattcacatgacacagtacttacctctgaggaggttgttctcaagaacggtgaactcgaagcactcgagacgcccgttgatagcttcacaaatggagctatcgttggcacaccagtctgtgtaaatggcctcatgctcttagagattaaggacaaagaacaatactgcgcattgtctcctggtttactggctacaaacaatgtctttcgcttaaaagggggtgcaccaattaaaggtgtaacctttggagaagatactgtttgggaagttcaaggttacaagaatgtgagaatcacatttgagcttgatgaacgtgttgacaaagtgcttaatgaaaagtgctctgtctacactgttgaatccggtaccgaagttactgagtttgcatgtgttgtagcagaggctgttgtgaagactttacaaccagtttctgatctccttaccaacatgggtattgatcttgatgagtggagtgtagctacattctacttatttgatgatgctggtgaagaaaacttttcatcacgtatgtattgttccttttaccctccagatgaggaagaagaggacgatgcagagtgtgaggaagaagaaattgatgaaacctgtgaacatgagtacggtacagaggatgattatcaaggtctccctctggaatttggtgcctcagctgaaacagttcgagttgaggaagaagaagaggaagactggctggatgatactactgagcaatcagagattgagccagaaccagaacctacacctgaagaaccagttaatcagtttactggttatttaaaacttactgacaatgttgccattaaatgtgttgacatcgttaaggaggcacaaagtgctaatcctatggtgattgtaaatgctgctaacatacacctgaaacatggtggtggtgtagcaggtgcactcaacaaggcaaccaatggtgccatgcaaaaggagagtgatgattacattaagctaaatggccctcttacagtaggagggtcttgtttgctttctggacataatcttgctaagaagtgtctgcatgttgttggacctaacctaaatgcaggtgaggacatccagcttcttaaggcagcatatgaaaatttcaattcacaggacatcttacttgcaccattgttgtcagcaggcatatttggtgctaaaccacttcagtctttacaagtgtgcgtgcagacggttcgtacacaggtttatattgcagtcaatgacaaagctctttatgagcaggttgtcatggattatcttgataacctgaagcctagagtggaagcacctaaacaagaggagccaccaaacacagaagattccaaaactgaggagaaatctgtcgtacagaagcctgtcgatgtgaagccaaaaattaaggcctgcattgatgaggttaccacaacactggaagaaactaagtttcttaccaataagttactcttgtttgctgatatcaatggtaagctttaccatgattctcagaacatgcttagaggtgaagatatgtctttccttgagaaggatgcaccttacatggtaggtgatgttatcactagtggtgatatcacttgtgttgtaataccctccaaaaaggctggtggcactactgagatgctctcaagagctttgaagaaagtgccagttgatgagtatataaccacgtaccctggacaaggatgtgctggttatacacttgaggaagctaagactgctcttaagaaatgcaaatctgcattttatgtactaccttcagaagcacctaatgctaaggaagagattctaggaactgtatcctggaatttgagagaaatgcttgctcatgctgaagagacaagaaaattaatgcctatatgcatggatgttagagccataatggcaaccatccaacgtaagtataaaggaattaaaattcaagagggcatcgttgactatggtgtccgattcttcttttatactagtaaagagcctgtagcttctattattacgaagctgaactctctaaatgagccgcttgtcacaatgccaattggttatgtgacacatggttttaatcttgaagaggctgcgcgctgtatgcgttctcttaaagctcctgccgtagtgtcagtatcatcaccagatgctgttactacatataatggatacctcacttcgtcatcaaagacatctgaggagcactttgtagaaacagtttctttggctggctcttacagagattggtcctattcaggacagcgtacagagttaggtgttgaatttcttaagcgtggtgacaaaattgtgtaccacactctggagagccccgtcgagtttcatcttgacggtgaggttctttcacttgacaaactaaagagtctcttatccctgcgggaggttaagactataaaagtgttcacaactgtggacaacactaatctccacacacagcttgtggatatgtctatgacatatggacagcagtttggtccaacatacttggatggtgctgatgttacaaaaattaaacctcatgtaaatcatgagggtaagactttctttgtactacctagtgatgacacactacgtagtgaagctttcgagtactaccatactcttgatgagagttttcttggtaggtacatgtctgctttaaaccacacaaagaaatggaaatttcctcaagttggtggtttaacttcaattaaatgggctgataacaattgttatttgtctagtgttttattagcacttcaacagcttgaagtcaaattcaatgcaccagcacttcaagaggcttattatagagcccgtgctggtgatgctgctaacttttgtgcactcatactcgcttacagtaataaaactgttggcgagcttggtgatgtcagagaaactatgacccatcttctacagcatgctaatttggaatctgcaaagcgagttcttaatgtggtgtgtaaacattgtggtcagaaaactactaccttaacgggtgtagaagctgtgatgtatatgggtactctatcttatgataatcttaagacaggtgtttccattccatgtgtgtgtggtcgtgatgctacacaatatctagtacaacaagagtcttcttttgttatgatgtctgcaccacctgctgagtataaattacagcaaggtacattcttatgtgcgaatgagtacactggtaactatcagtgtggtcattacactcatataactgctaaggagaccctctatcgtattgacggagctcaccttacaaagatgtcagagtacaaaggaccagtgactgatgttttctacaaggaaacatcttacactacaaccatcaagcctgtgtcgtataaactcgatggagttacttacacagagattgaaccaaaattggatgggtattataaaaaggataatgcttactatacagagcagcctatagaccttgtaccaactcaaccattaccaaatgcgagttttgataatttcaaactcacatgttctaacacaaaatttgctgatgatttaaatcaaatgacaggcttcacaaagccagcttcacgagagctatctgtcacattcttcccagacttgaatggcgatgtagtggctattgactatagacactattcagcgagtttcaagaaaggtgctaaattactgcataagccaattgtttggcacattaaccaggctacaaccaagacaacgttcaaaccaaacacttggtgtttacgttgtctttggagtacaaagccagtagatacttcaaattcatttgaagttctggcagtagaagacacacaaggaatggacaatcttgcttgtgaaagtcaacaacccacctctgaagaagtagtggaaaatcctaccatacagaaggaagtcatagagtgtgacgtgaaaactaccgaagttgtaggcaatgtcatacttaaaccatcagatgaaggtgttaaagtaacacaagagttaggtcatgaggatcttatggctgcttatgtggaaaacacaagcattaccattaagaaacctaatgagctttcactagccttaggtttaaaaacaattgccactcatggtattgctgcaattaatagtgttccttggagtaaaattttggcttatgtcaaaccattcttaggacaagcagcaattacaacatcaaattgcgctaagagattagcacaacgtgtgtttaacaattatatgccttatgtgtttacattattgttccaattgtgtacttttactaaaagtaccaattctagaattagagcttcactacctacaactattgctaaaaatagtgttaagagtgttgctaaattatgtttggatgccggcattaattatgtgaagtcacccaaattttctaaattgttcacaatcgctatgtggctattgttgttaagtatttgcttaggttctctaatctgtgtaactgctgcttttggtgtactcttatctaattttggtgctccttcttattgtaatggcgttagagaattgtatcttaattcgtctaacgttactactatggatttctgtgaaggttcttttccttgcagcatttgtttaagtggattagactcccttgattcttatccagctcttgaaaccattcaggtgacgatttcatcgtacaagctagacttgacaattttaggtctggccgctgagtgggttttggcatatatgttgttcacaaaattcttttatttattaggtctttcagctataatgcaggtgttctttggctattttgctagtcatttcatcagcaattcttggctcatgtggtttatcattagtattgtacaaatggcacccgtttctgcaatggttaggatgtacatcttctttgcttctttctactacatatggaagagctatgttcatatcatggatggttgcacctcttcgacttgcatgatgtgctataagcgcaatcgtgccacacgcgttgagtgtacaactattgttaatggcatgaagagatctttctatgtctatgcaaatggaggccgtggcttctgcaagactcacaattggaattgtctcaattgtgacacattttgcactggtagtacattcattagtgatgaagttgctcgtgatttgtcactccagtttaaaagaccaatcaaccctactgaccagtcatcgtatattgttgatagtgttgctgtgaaaaatggcgcgcttcacctctactttgacaaggctggtcaaaagacctatgagagacatccgctctcccattttgtcaatttagacaatttgagagctaacaacactaaaggttcactgcctattaatgtcatagtttttgatggcaagtccaaatgcgacgagtctgcttctaagtctgcttctgtgtactacagtcagctgatgtgccaacctattctgttgcttgaccaagctcttgtatcagacgttggagatagtactgaagtttccgttaagatgtttgatgcttatgtcgacaccttttcagcaacttttagtgttcctatggaaaaacttaaggcacttgttgctacagctcacagcgagttagcaaagggtgtagctttagatggtgtcctttctacattcgtgtcagctgcccgacaaggtgttgttgataccgatgttgacacaaaggatgttattgaatgtctcaaactttcacatcactctgacttagaagtgacaggtgacagttgtaacaatttcatgctcacctataataaggttgaaaacatgacgcccagagatcttggcgcatgtattgactgtaatgcaaggcatatcaatgcccaagtagcaaaaagtcacaatgtttcactcatctggaatgtaaaagactacatgtctttatctgaacagctgcgtaaacaaattcgtagtgctgccaagaagaacaacataccttttagactaacttgtgctacaactagacaggttgtcaatgtcataactactaaaatctcactcaagggtggtaagattgttagtacttgttttaaacttatgcttaaggccacattattgtgcgttcttgctgcattggtttgttatatcgttatgccagtacatacattgtcaatccatgatggttacacaaatgaaatcattggttacaaagccattcaggatggtgtcactcgtgacatcatttctactgatgattgttttgcaaataaacatgctggttttgacgcatggtttagccagcgtggtggttcatacaaaaatgacaaaagctgccctgtagtagctgctatcattacaagagagattggtttcatagtgcctggcttaccgggtactgtgctgagagcaatcaatggtgacttcttgcattttctacctcgtgtttttagtgctgttggcaacatttgctacacaccttccaaactcattgagtatagtgattttgctacctctgcttgcgttcttgctgctgagtgtacaatttttaaggatgctatgggcaaacctgtgccatattgttatgacactaatttgctagagggttctatttcttatagtgagcttcgtccagacactcgttatgtgcttatggatggttccatcatacagtttcctaacacttacctggagggttctgttagagtagtaacaacttttgatgctgagtactgtagacatggtacatgcgaaaggtcagaagtaggtatttgcctatctaccagtggtagatgggttcttaataatgagcattacagagctctatcaggagttttctgtggtgttgatgcgatgaatctcatagctaacatctttactcctcttgtgcaacctgtgggtgctttagatgtgtctgcttcagtagtggctggtggtattattgccatattggtgacttgtgctgcctactactttatgaaattcagacgtgtttttggtgagtacaaccatgttgttgctgctaatgcacttttgtttttgatgtctttcactatactctgtctggtaccagcttacagctttctgccgggagtctactcagtcttttacttgtacttgacattctatttcaccaatgatgtttcattcttggctcaccttcaatggtttgccatgttttctcctattgtgcctttttggataacagcaatctatgtattctgtatttctctgaagcactgccattggttctttaacaactatcttaggaaaagagtcatgtttaatggagttacatttagtaccttcgaggaggctgctttgtgtacctttttgctcaacaaggaaatgtacctaaaattgcgtagcgagacactgttgccacttacacagtataacaggtatcttgctctatataacaagtacaagtatttcagtggagccttagatactaccagctatcgtgaagcagcttgctgccacttagcaaaggctctaaatgactttagcaactcaggtgctgatgttctctaccaaccaccacagacatcaatcacttctgctgttctgcagagtggttttaggaaaatggcattcccgtcaggcaaagttgaagggtgcatggtacaagtaacctgtggaactacaactcttaatggattgtggttggatgacacagtatactgtccaagacatgtcatttgcacagcagaagacatgcttaatcctaactatgaagatctgctcattcgcaaagccaaccatagctttcttgttcaggctggcaatgttcaacttcgtgttattggccattctatgcaaaattgtctgcttaggcttaaagttgatacttctaaccctaagacacccaagtataaatttgtccgtatccaacctggtcaaacattttcagttctagcatgctacaatggttcaccatctggtgtttatcagtgtgccatgagacctaatcataccattaaaggttctttccttaatggatcatgtggtagtgttggttttaacattgattatgattgcgtgtctttctgctatatgcatcatatggagcttccaacaggagtacacgctggtactgacttagaaggtaaattctatggtccatttgttgacagacaaactgcacaggctgcaggtacagacacaaccataacattaaatgttttggcatggctgtatgctgctgttatcaatggtgataggtggtttcttaatagattcaccactactttgaatgactttaaccttgtggcaatgaagtacaactatgaacctttgacacaagatcatgttgacatattgggacctctttctgctcaaacaggaattgccgtcttagatatgtgtgctgctttgaaagagctgctgcagaatggtatgaatggtcgtactatccttggtagcactattttagaagatgagtttacaccatttgatgttgttagacaatgctctggtgttaccttccaaggtaagttcaagaaaattgttaagggcactcatcattggatgcttttaactttcttgacatcactattgattcttgttcaaagtacacagtggtcactgtttttctttgtttacgagaatgctttcttgccatttactcttggtattatggcaattgctgcatgtgctatgctgcttgttaagcataagcacgcattcttgtgcttgtttctgttaccttctcttgcaacagttgcttactttaatatggtctacatgcctgctagctgggtgatgcgtatcatgacatggcttgaattggctgacactagcttgtctggttataggcttaaggattgtgttatgtatgcttcagctttagttttgcttattctcatgacagctcgcactgtttatgatgatgctgctagacgtgtttggacactgatgaatgtcattacacttgtttacaaagtctactatggtaatgctttagatcaagctatttccatgtgggccttagttatttctgtaacctctaactattctggtgtcgttacgactatcatgtttttagctagagctatagtgtttgtgtgtgttgagtattacccattgttatttattactggcaacaccttacagtgtatcatgcttgtttattgtttcttaggctattgttgctgctgctactttggccttttctgtttactcaaccgttacttcaggcttactcttggtgtttatgactacttggtctctacacaagaatttaggtatatgaactcccaggggcttttgcctcctaagagtagtattgatgctttcaagcttaacattaagttgttgggtattggaggtaaaccatgtatcaaggttgctactgtacagtctaaaatgtctgacgtaaagtgcacatctgtggtactgctctcggttcttcaacaacttagagtagagtcatcttctaaattgtgggcacaatgtgtacaactccacaatgatattcttcttgcaaaagacacaactgaagctttcgagaagatggtttctcttttgtctgttttgctatccatgcagggtgctgtagacattaataggttgtgcgaggaaatgctcgataaccgtgctactcttcaggctattgcttcagaatttagttctttaccatcatatgccgcttatgccactgcccaggaggcctatgagcaggctgtagctaatggtgattctgaagtcgttctcaaaaagttaaagaaatctttgaatgtggctaaatctgagtttgaccgtgatgctgccatgcaacgcaagttggaaaagatggcagatcaggctatgacccaaatgtacaaacaggcaagatctgaggacaagagggcaaaagtaactagtgctatgcaaacaatgctcttcactatgcttaggaagcttgataatgatgcacttaacaacattatcaacaatgcgcgtgatggttgtgttccactcaacatcataccattgactacagcagccaaactcatggttgttgtccctgattatggtacctacaagaacacttgtgatggtaacacctttacatatgcatctgcactctgggaaatccagcaagttgttgatgcggatagcaagattgttcaacttagtgaaattaacatggacaattcaccaaatttggcttggcctcttattgttacagctctaagagccaactcagctgttaaactacagaataatgaactgagtccagtagcactacgacagatgtcctgtgcggctggtaccacacaaacagcttgtactgatgacaatgcacttgcctactataacaattcgaagggaggtaggtttgtgctggcattactatcagaccaccaagatctcaaatgggctagattccctaagagtgatggtacaggtacaatttacacagaactggaaccaccttgtaggtttgttacagacacaccaaaagggcctaaagtgaaatacttgtacttcatcaaaggcttaaacaacctaaatagaggtatggtgctgggcagtttagctgctacagtacgtcttcaggctggaaatgctacagaagtacctgccaattcaactgtgctttccttctgtgcttttgcagtagaccctgctaaagcatataaggattacctagcaagtggaggacaaccaatcaccaactgtgtgaagatgttgtgtacacacactggtacaggacaggcaattactgtaacaccagaagctaacatggaccaagagtcctttggtggtgcttcatgttgtctgtattgtagatgccacattgaccatccaaatcctaaaggattctgtgacttgaaaggtaagtacgtccaaatacctaccacttgtgctaatgacccagtgggttttacacttagaaacacagtctgtaccgtctgcggaatgtggaaaggttatggctgtagttgtgaccaactccgcgaacccttgatgcagtctgcggatgcatcaacgtttttaaacgggtttgcggtgtaagtgcagcccgtcttacaccgtgcggcacaggcactagtactgatgtcgtctacagggcttttgatatttacaacgaaaaagttgctggttttgcaaagttcctaaaaactaattgctgtcgcttccaggagaaggatgaggaaggcaatttattagactcttactttgtagttaagaggcatactatgtctaactaccaacatgaagagactatttataacttggttaaagattgtccagcggttgctgtccatgactttttcaagtttagagtagatggtgacatggtaccacatatatcacgtcagcgtctaactaaatacacaatggctgatttagtctatgctctacgtcattttgatgagggtaattgtgatacattaaaagaaatactcgtcacatacaattgctgtgatgatgattatttcaataagaaggattggtatgacttcgtagagaatcctgacatcttacgcgtatatgctaacttaggtgagcgtgtacgccaatcattattaaagactgtacaattctgcgatgctatgcgtgatgcaggcattgtaggcgtactgacattagataatcaggatcttaatgggaactggtacgatttcggtgatttcgtacaagtagcaccaggctgcggagttcctattgtggattcatattactcattgctgatgcccatcctcactttgactagggcattggctgctgagtcccatatggatgctgatctcgcaaaaccacttattaagtgggatttgctgaaatatgattttacggaagagagactttgtctcttcgaccgttattttaaatattgggaccagacataccatcccaattgtattaactgtttggatgataggtgtatccttcattgtgcaaactttaatgtgttattttctactgtgtttccacctacaagttttggaccactagtaagaaaaatatttgtagatggtgttccttttgttgtttcaactggataccattttcgtgagttaggagtcgtacataatcaggatgtaaacttacatagctcgcgtctcagtttcaaggaacttttagtgtatgctgctgatccagctatgcatgcagcttctggcaatttattgctagataaacgcactacatgcttttcagtagctgcactaacaaacaatgttgcttttcaaactgtcaaacccggtaattttaataaagacttttatgactttgctgtgtctaaaggtttctttaaggaaggaagttctgttgaactaaaacacttcttctttgctcaggatggcaacgctgctatcagtgattatgactattatcgttataatctgccaacaatgtgtgatatcagacaactcctattcgtagttgaagttgttgataaatactttgattgttacgatggtggctgtattaatgccaaccaagtaatcgttaacaatctggataaatcagctggtttcccatttaataaatggggtaaggctagactttattatgactcaatgagttatgaggatcaagatgcacttttcgcgtatactaagcgtaatgtcatccctactataactcaaatgaatcttaagtatgccattagtgcaaagaatagagctcgcaccgtagctggtgtctctatctgtagtactatgacaaatagacagtttcatcagaaattattgaagtcaatagccgccactagaggagctactgtggtaattggaacaagcaagttttacggtggctggcataatatgttaaaaactgtttacagtgatgtagaaactccacaccttatgggttgggattatccaaaatgtgacagagccatgcctaacatgcttaggataatggcctctcttgttcttgctcgcaaacataacacttgctgtaacttatcacaccgtttctacaggttagctaacgagtgtgcgcaagtattaagtgagatggtcatgtgtggcggctcactatatgttaaaccaggtggaacatcatccggtgatgctacaactgcttatgctaatagtgtctttaacatttgtcaagctgttacagccaatgtaaatgcacttctttcaactgatggtaataagatagctgacaagtatgtccgcaatctacaacacaggctctatgagtgtctctatagaaatagggatgttgatcatgaattcgtggatgagttttacgcttacctgcgtaaacatttctccatgatgattctttctgatgatgccgttgtgtgctataacagtaactatgcggctcaaggtttagtagctagcattaagaactttaaggcagttctttattatcaaaataatgtgttcatgtctgaggcaaaatgttggactgagactgaccttactaaaggacctcacgaattttgctcacagcatacaatgctagttaaacaaggagatgattacgtgtacctgccttacccagatccatcaagaatattaggcgcaggctgttttgtcgatgatattgtcaaaacagatggtacacttatgattgaaaggttcgtgtcactggctattgatgcttacccacttacaaaacatcctaatcaggagtatgctgctgtctttcacttgtatttacaatacattagaaagttacatgatgagcttactggccacatgttggacatgtattccgtaatgctaactaatgataacacctcacggtactgggaacctgagttttatgaggctatgtacacaccacatacagtcttgcaggctgtaggtgcttgtgtattgtgcaattcacagacttcacttcgttgcggtgcctgtattaggagaccattcctatgttgcaagtgctgctatgaccatgtcatttcaacatcacacaaattagtgttgtctgttaatccctatgtttgcaatgccccaggttgtgatgtcactgatgtgacacaactgtatctaggaggtatgagctattattgcaagtcacataagcctcccattagttttccattatgtgctaatggtcaggtttttggtttatacaaaaacacatgtgtaggcagtgacaatgtcactgacttcaatgcgatagcaacatgtgattggactaatgctggcgattacatacttgccaacacttgtactgagagactcaagcttttcgcagcagaaacgctcaaagccactgaggaaacatttaagctgtcatatggtattgccactgtacgcgaagtactctctgacagagaattgcatctttcatgggaggttggaaaacctagaccaccattgaacagaaactatgtctttactggttaccgtgtaactaaaaatagtaaagtacagattggagagtacacctttgaaaaaggtgactatggtgatgctgttgtgtacagaggtactacgacatacaagttgaatgttggtgattactttgtgttgacatctcacactgtaatgccacttagtgcacctactctagtgtcacaagagcactatgtgagaattactggcttgtacccaacactcaacatctcagatgagttttctagcaatgttgcaaattatcaaaaggtcggcatgcaaaagtactctacactccaaggaccacctggtactggtaagagtcattttgccatcggacttgctctctattacccatctgctcgcatagtgtatacggcatgctctcatgcagctgttgatgccctatgtgaaaaggcattaaaatatttgcccatagataaatgtagtagaatcatacctgcgcgtgcgcgcgtagagtgttttgataaattcaaagtgaattcaacactagaacagtatgttttctgcactgtaaatgcattgccagaaacaactgctgacattgtagtctttgatgaaatctctatggctactaattatgacttgagtgttgtcaatgctagacttcgtgcaaaacactacgtctatattggcgatcctgctcaattaccagccccccgcacattgctgactaaaggcacactagaaccagaatattttaattcagtgtgcagacttatgaaaacaataggtccagacatgttccttggaacttgtcgccgttgtcctgctgaaattgttgacactgtgagtgctttagtttatgacaataagctaaaagcacacaaggataagtcagctcaatgcttcaaaatgttctacaaaggtgttattacacatgatgtttcatctgcaatcaacagacctcaaataggcgttgtaagagaatttcttacacgcaatcctgcttggagaaaagctgtttttatctcaccttataattcacagaacgctgtagcttcaaaaatcttaggattgcctacgcagactgttgattcatcacagggttctgaatatgactatgtcatattcacacaaactactgaaacagcacactcttgtaatgtcaaccgcttcaatgtggctatcacaagggcaaaaattggcattttgtgcataatgtctgatagagatctttatgacaaactgcaatttacaagtctagaaataccacgtcgcaatgtggctacattacaagcagaaaatgtaactggactttttaaggactgtagtaagatcattactggtcttcatcctacacaggcacctacacacctcagcgttgatataaagttcaagactgaaggattatgtgttgacataccaggcataccaaaggacatgacctaccgtagactcatctctatgatgggtttcaaaatgaattaccaagtcaatggttaccctaatatgtttatcacccgcgaagaagctattcgtcacgttcgtgcgtggattggctttgatgtagagggctgtcatgcaactagagatgctgtgggtactaacctacctctccagctaggattttctacaggtgttaacttagtagctgtaccgactggttatgttgacactgaaaataacacagaattcaccagagttaatgcaaaacctccaccaggtgaccagtttaaacatcttataccactcatgtataaaggcttgccctggaatgtagtgcgtattaagatagtacaaatgctcagtgatacactgaaaggattgtcagacagagtcgtgttcgtcctttgggcgcatggctttgagcttacatcaatgaagtactttgtcaagattggacctgaaagaacgtgttgtctgtgtgacaaacgtgcaacttgcttttctacttcatcagatacttatgcctgctggaatcattctgtgggttttgactatgtctataacccatttatgattgatgttcagcagtggggctttacgggtaaccttcagagtaaccatgaccaacattgccaggtacatggaaatgcacatgtggctagttgtgatgctatcatgactagatgtttagcagtccatgagtgctttgttaagcgcgttgattggtctgttgaataccctattataggagatgaactgagggttaattctgcttgcagaaaagtacaacacatggttgtgaagtctgcattgcttgctgataagtttccagttcttcatgacattggaaatccaaaggctatcaagtgtgtgcctcaggctgaagtagaatggaagttctacgatgctcagccatgtagtgacaaagcttacaaaatagaggaactcttctattcttatgctacacatcacgataaattcactgatggtgtttgtttgttttggaattgtaacgttgatcgttacccagccaatgcaattgtgtgtaggtttgacacaagagtcttgtcaaacttgaacttaccaggctgtgatggtggtagtttgtatgtgaataagcatgcattccacactccagctttcgataaaagtgcatttactaatttaaagcaattgcctttcttttactattctgatagtccttgtgagtctcatggcaaacaagtagtgtcggatattgattatgttccactcaaatctgctacgtgtattacacgatgcaatttaggtggtgctgtttgcagacaccatgcaaatgagtaccgacagtacttggatgcatataatatgatgatttctgctggatttagcctatggatttacaaacaatttgatacttataacctgtggaatacatttaccaggttacagagtttagaaaatgtggcttataatgttgttaataaaggacactttgatggacacgccggcgaagcacctgtttccatcattaataatgctgtttacacaaaggtagatggtattgatgtggagatctttgaaaataagacaacacttcctgttaatgttgcatttgagctttgggctaagcgtaacattaaaccagtgccagagattaagatactcaataatttgggtgttgatatcgctgctaatactgtaatctgggactacaaaagagaagccccagcacatgtatctacaataggtgtctgcacaatgactgacattgccaagaaacctactgagagtgcttgttcttcacttactgtcttgtttgatggtagagtggaaggacaggtagacctttttagaaacgcccgtaatggtgttttaataacagaaggttcagtcaaaggtctaacaccttcaaagggaccagcacaagctagcgtcaatggagtcacattaattggagaatcagtaaaaacacagtttaactactttaagaaagtagacggcattattcaacagttgcctgaaacctactttactcagagcagagacttagaggattttaagcccagatcacaaatggaaactgactttctcgagctcgctatggatgaattcatacagcgatataagctcgagggctatgccttcgaacacatcgtttatggagatttcagtcatggacaacttggcggtcttcatttaatgataggcttagccaagcgctcacaagattcaccacttaaattagaggattttatccctatggacagcacagtgaaaaattacttcataacagatgcgcaaacaggttcatcaaaatgtgtgtgttctgtgattgatcttttacttgatgactttgtcgagataataaagtcacaagatttgtcagtgatttcaaaagtggtcaaggttacaattgactatgctgaaatttcattcatgctttggtgtaaggatggacatgttgaaaccttctacccaaaactacaagcaagtcaagcgtggcaaccaggtgttgcgatgcctaacttgtacaagatgcaaagaatgcttcttgaaaagtgtgaccttcagaattatggtgaaaatgctgttataccaaaaggaataatgatgaatgtcgcaaagtatactcaactgtgtcaatacttaaatacacttactttagctgtaccctacaacatgagagttattcactttggtgctggctctgataaaggagttgcaccaggtacagctgtgctcagacaatggttgccaactggcacactacttgtcgattcagatcttaatgacttcgtctccgacgcagattctactttaattggagactgtgcaacagtacatacggctaataaatgggaccttattattagcgatatgtatgaccctaggaccaaacatgtgacaaaagagaatgactctaaagaagggtttttcacttatctgtgtggatttataaagcaaaaactagccctgggtggttctatagctgtaaagataacagagcattcttggaatgctgacctttacaagcttatgggccatttctcatggtggacagcttttgttacaaatgtaaatgcatcatcatcggaagcatttttaattggggctaactatcttggcaagccgaaggaacaaattgatggctataccatgcatgctaactacattttctggaggaacacaaatcctatccagttgtcttcctattcactctttgacatgagcaaatttcctcttaaattaagaggaactgctgtaatgtctcttaaggagaatcaaatcaatgatatgatttattctcttctggaaaaaggtaggcttatcattagagaaaacaacagagttgtggtttcaagtgatattcttgttaacaactaaacgaacatgtttattttcttattatttcttactctcactagtggtagtgaccttgaccggtgcaccacttttgatgatgttcaagctcctaattacactcaacatacttcatctatgaggggggtttactatcctgatgaaatttttagatcagacactctttatttaactcaggatttatttcttccattttattctaatgttacagggtttcatactattaatcatacgtttggcaaccctgtcataccttttaaggatggtatttattttgctgccacagagaaatcaaatgttgtccgtggttgggtttttggttctaccatgaacaacaagtcacagtcggtgattattattaacaattctactaatgttgttatacgagcatgtaactttgaattgtgtgacaaccctttctttgctgtttctaaacccatgggtacacagacacatactatgatattcgataatgcatttaattgcactttcgagtacatatctgatgccttttcgcttgatgtttcagaaaagtcaggtaattttaaacacttacgagagtttgtgtttaaaaataaagatgggtttctctatgtttataagggctatcaacctatagatgtagttcgtgatctaccttctggttttaacactttgaaacctatttttaagttgcctcttggtattaacattacaaattttagagccattcttacagccttttcacctgctcaagacatttggggcacgtcagctgcagcctattttgttggctatttaaagccaactacatttatgctcaagtatgatgaaaatggtacaatcacagatgctgttgattgttctcaaaatccacttgctgaactcaaatgctctgttaagagctttgagattgacaaaggaatttaccagacctctaatttcagggttgttccctcaggagatgttgtgagattccctaatattacaaacttgtgtccttttggagaggtttttaatgctactaaattcccttctgtctatgcatgggagagaaaaaaaatttctaattgtgttgctgattactctgtgctctacaactcaacatttttttcaacctttaagtgctatggcgtttctgccactaagttgaatgatctttgcttctccaatgtctatgcagattcttttgtagtcaagggagatgatgtaagacaaatagcgccaggacaaactggtgttattgctgattataattataaattgccagatgatttcatgggttgtgtccttgcttggaatactaggaacattgatgctacttcaactggtaattataattataaatataggtctcttagacatggcaagcttaggccctttgagagagacatatctaatgtgcctttctcccctgatggcaaaccttgcaccccacctgctcttaattgttattggccattaaatgattatggtttttacaccactactggcattggctaccaaccttacagagttgtagtactttcttttgaacttttaaatgcaccggccacggtttgtggaccaaaattatccactgaccttattaagaaccagtgtgtcaattttaattttaatggactcactggtactggtgtgttaactccttcttcaaagagatttcaaccatttcaacaatttggccgtgatgtttctgatttcactgattccgttcgagatcctaaaacatctgaaatattagacatttcaccttgctcttttgggggtgtaagtgtaattacacctggaacaaatgcttcatctgaagttgctgttctatatcaagatgttaactgcactgatgtttctacagcaattcatgcagatcaactcacaccagcttggcgcatatattctactggaaacaatgtattccagactcaagcaggctgtcttataggagctgagcatgtcgacacttcttatgagtgcgacattcctattggagctggcatttgtgctagttaccatacagtttctttattacgtagtactagccaaaaatctattgtggcttatactatgtctttaggtgctgatagttcaattgcttactctaataacaccattgctatacctactaacttttcaattagcattactacagaagtaatgcctgtttctatggctaaaacctccgtagattgtaatatgtacatctgcggagattctactgaatgtgctaatttgcttctccaatatggtagcttttgcacacaactaaatcgtgcactctcaggtattgctgctgaacaggatcgcaacacacgtgaagtgttcgctcaagtcaaacaaatgtacaaaaccccaactttgaaatattttggtggttttaatttttcacaaatattacctgaccctctaaagccaactaagaggtcttttattgaggacttgctctttaataaggtgacactcgctgatgctggcttcatgaagcaatatggcgaatgcctaggtgatattaatgctagagatctcatttgtgcgcagaagttcaatggacttacagtgttgccacctctgctcactgatgatatgattgctgcctacactgctgctctagttagtggtactgccactgctggatggacatttggtgctggcgctgctcttcaaataccttttgctatgcaaatggcatataggttcaatggcattggagttacccaaaatgttctctatgagaaccaaaaacaaatcgccaaccaatttaacaaggcgattagtcaaattcaagaatcacttacaacaacatcaactgcattgggcaagctgcaagacgttgttaaccagaatgctcaagcattaaacacacttgttaaacaacttagctctaattttggtgcaatttcaagtgtgctaaatgatatcctttcgcgacttgataaagtcgaggcggaggtacaaattgacaggttaattacaggcagacttcaaagccttcaaacctatgtaacacaacaactaatcagggctgctgaaatcagggcttctgctaatcttgctgctactaaaatgtctgagtgtgttcttggacaatcaaaaagagttgacttttgtggaaagggctaccaccttatgtccttcccacaagcagccccgcatggtgttgtcttcctacatgtcacgtatgtgccatcccaggagaggaacttcaccacagcgccagcaatttgtcatgaaggcaaagcatacttccctcgtgaaggtgtttttgtgtttaatggcacttcttggtttattacacagaggaacttcttttctccacaaataattactacagacaatacatttgtctcaggaaattgtgatgtcgttattggcatcattaacaacacagtttatgatcctctgcaacctgagcttgactcattcaaagaagagctggacaagtacttcaaaaatcatacatcaccagatgttgatcttggcgacatttcaggcattaacgcttctgtcgtcaacattcaaaaagaaattgaccgcctcaatgaggtcgctaaaaatttaaatgaatcactcattgaccttcaagaattgggaaaatatgagcaatatattaaatggccttggtatgtttggctcggcttcattgctggactaattgccatcgtcatggttacaatcttgctttgttgcatgactagttgttgcagttgcctcaagggtgcatgctcttgtggttcttgctgcaagtttgatgaggatgactctgagccagttctcaagggtgtcaaattacattacacataaacgaacttatggatttgtttatgagattttttactcttggatcaattactgcacagccagtaaaaattgacaatgcttctcctgcaagtactgttcatgctacagcaacgataccgctacaagcctcactccctttcggatggcttgttattggcgttgcatttcttgctgtttttcagagcgctaccaaaataattgcgctcaataaaagatggcagctagccctttataagggcttccagttcatttgcaatttactgctgctatttgttaccatctattcacatcttttgcttgtcgctgcaggtatggaggcgcaatttttgtacctctatgccttgatatattttctacaatgcatcaacgcatgtagaattattatgagatgttggctttgttggaagtgcaaatccaagaacccattactttatgatgccaactactttgtttgctggcacacacataactatgactactgtataccatataacagtgtcacagatacaattgtcgttactgaaggtgacggcatttcaacaccaaaactcaaagaagactaccaaattggtggttattctgaggataggcactcaggtgttaaagactatgtcgttgtacatggctatttcaccgaagtttactaccagcttgagtctacacaaattactacagacactggtattgaaaatgctacattcttcatctttaacaagcttgttaaagacccaccgaatgtgcaaatacacacaatcgacggctcttcaggagttgctaatccagcaatggatccaatttatgatgagccgacgacgactactagcgtgcctttgtaagcacaagaaagtgagtacgaacttatgtactcattcgtttcggaagaaacaggtacgttaataaatagcgtacttctttttcttgctttcgtggtattcttgctagtcacactagccatccttactgcgcttcgattgtgtgcgtactgctgctatattgttaacgtgagtttagtaaaaccaacggtttacgtctactcgcgtgttaaaaatctgaactcttctgaaggagttcctgatcttctggtctaaacgaactaactattattattattctgtttggaactttaacattgcttatcatggcagacaacggtactattaccgttgaggagcttaaacaactcctggaacaatggaacctagtaataggtttcctatgcctagcctggattatgttactacaatttgcctattctaatcggaacaggtttttgtacataataaagcttgttttcctctggctcttgtggccagtaacacttgcttgttttgtgcttgctgctgtctacagaattaattgggtgactggcgggattgcgattgcaatggcttgtattgtaggcttgatgtggcttagctacttcgttgcttccttcaggctgtttgctcgtacccgctcaatgtggtcattcaacccagaaacaaacattcttctcaatgtgcctctccgggggacaattgtgaccagaccgctcatggaaagtgaacttgtcattggtgctgtgatcattcgtggtcacttgcgaatggccggacactccctagggcgctgtgacattaaggacctgccaaaagagatcactgtggctacatcacgaacgctttcttattacaaattaggagcgtcgcagcgtgtaggcactgattcaggttttgctgcatacaaccgctaccgtattggaaactataaattaaatacagaccacgccggtagcaacgacaatattgctttgctagtacagtaagtgacaacagatgtttcatcttgttgacttccaggttacaatagcagagatattgattatcattatgaggactttcaggattgctatttggaatcttgacgttataataagttcaatagtgagacaattatttaagcctctaactaagaagaattattcggagttagatgatgaagaacctatggagttagattatccataaaacgaacatgaaaattattctcttcctgacattgattgtatttacatcttgcgagctatatcactatcaggagtgtgttagaggtacgactgtactactaaaagaaccttgcccatcaggaacatacgagggcaattcaccatttcaccctcttgctgacaataaatttgcactaacttgcactagcacacactttgcttttgcttgtgctgacggtactcgacatacctatcagctgcgtgcaagatcagtttcaccaaaacttttcatcagacaagaggaggttcaacaagagctctactcgccactttttctcattgttgctgctctagtatttttaatactttgcttcaccattaagagaaagacagaatgaatgagctcactttaattgacttctatttgtgctttttagcctttctgctattccttgttttaataatgcttattatattttggttttcactcgaaatccaggatctagaagaaccttgtaccaaagtctaaacgaacatgaaacttctcattgttttgacttgtatttctctatgcagttgcatatgcactgtagtacagcgctgtgcatctaataaacctcatgtgcttgaagatccttgtaaggtacaacactaggggtaatacttatagcactgcttggctttgtgctctaggaaaggttttaccttttcatagatggcacactatggttcaaacatgcacacctaatgttactatcaactgtcaagatccagctggtggtgcgcttatagctaggtgttggtaccttcatgaaggtcaccaaactgctgcatttagagacgtacttgttgttttaaataaacgaacaaattaaaatgtctgataatggaccccaatcaaaccaacgtagtgccccccgcattacatttggtggacccacagattcaactgacaataaccagaatggaggacgcaatggggcaaggccaaaacagcgccgaccccaaggtttacccaataatactgcgtcttggttcacagctctcactcagcatggcaaggaggaacttagattccctcgaggccagggcgttccaatcaacaccaatagtggtccagatgaccaaattggctactaccgaagagctacccgacgagttcgtggtggtgacggcaaaatgaaagagctcagccccagatggtacttctattacctaggaactggcccagaagcttcacttccctacggcgctaacaaagaaggcatcgtatgggttgcaactgagggagccttgaatacacccaaagaccacattggcacccgcaatcctaataacaatgctgccaccgtgctacaacttcctcaaggaacaacattgccaaaaggcttctacgcagagggaagcagaggcggcagtcaagcctcttctcgctcctcatcacgtagtcgcggtaattcaagaaattcaactcctggcagcagtaggggaaattctcctgctcgaatggctagcggaggtggtgaaactgccctcgcgctattgctgctagacagattgaaccagcttgagagcaaagtttctggtaaaggccaacaacaacaaggccaaactgtcactaagaaatctgctgctgaggcatctaaaaagcctcgccaaaaacgtactgccacaaaacagtacaacgtcactcaagcatttgggagacgtggtccagaacaaacccaaggaaatttcggggaccaagacctaatcagacaaggaactgattacaaacattggccgcaaattgcacaatttgctccaagtgcctctgcattctttggaatgtcacgcattggcatggaagtcacaccttcgggaacatggctgacttatcatggagccattaaattggatgacaaagatccacaattcaaagacaacgtcatactgctgaacaagcacattgacgcatacaaaacattcccaccaacagagcctaaaaaggacaaaaagaaaaagactgatgaagctcagcctttgccgcagagacaaaagaagcagcccactgtgactcttcttcctgcggctgacatggatgatttctccagacaacttcaaaattccatgagtggagcttctgctgattcaactcaggcataaacactcatgatgaccacacaaggcagatgggctatgtaaacgttttcgcaattccgtttacgatacatagtctactcttgtgcagaatgaattctcgtaactaaacagcacaagtaggtttagttaactttaatctcacatagcaatctttaatcaatgtgtaacattagggaggacttgaaagagccaccacattttcatcgaggccacgcggagtacgatcgagggtacagtgaataatgctagggagagctgcctatatggaagagccctaatgtgtaaaattaattttagtagtgctatccccatgtgattttaatagcttcttaggagaatgacaaaaaaaaaaaaaaaaa

SEQ ID NO: 29818 - DNA, 29740 bp, SARS Coronavirus
atattaggtttttacctacccaggaaaagccaaccaacctcgatctcttgtagatctgttctctaaacgaactttaaaatctgtgtagctgtcgctcggctgcatgcctagtgcacctacgcagtataaacaataataaattttactgtcgttgacaagaaacgagtaactcgtccctcttctgcagactgcttacggtttcgtccgtgttgcagtcgatcatcagcatacctaggtttcgtccgggtgtgaccgaaaggtaagatggagagccttgttcttggtgtcaacgagaaaacacacgtccaactcagtttgcctgtccttcaggttagagacgtgctagtgcgtggcttcggggactctgtggaagaggccctatcggaggcacgtgaacacctcaaaaatggcacttgtggtctagtagagctggaaaaaggcgtactgccccagcttgaacagccctatgtgttcattaaacgttctgatgccttaagcaccaatcacggccacaaggtcgttgagctggttgcagaaatggacggcattcagtacggtcgtagcggtataacactgggagtactcgtgccacatgtgggcgaaaccccaattgcataccgcaatgttcttcttcgtaagaacggtaataagggagccggtggtcatagctatggcatcgatctaaagtcttatgacttaggtgacgagcttggcactgatcccattgaagattatgaacaaaactggaacactaagcatggcagtggtgcactccgtgaactcactcgtgagctcaatggaggtgcagtcactcgctatgtcgacaacaatttctgtggcccagatgggtaccctcttgattgcatcaaagattttctcgcacgcgcgggcaagtcaatgtgcactctttccgaacaacttgattacatcgagtcgaagagaggtgtctactgctgccgtgaccatgagcatgaaattgcctggttcactgagcgctctgataagagctacgagcaccagacacccttcgaaattaagagtgccaagaaatttgacactttcaaaggggaatgcccaaagtttgtgtttcctcttaactcaaaagtcaaagtcattcaaccacgtgttgaaaagaaaaagactgagggtttcatggggcgtatacgctctgtgtaccctgttgcatctccacaggagtgtaacaatatgcacttgtctaccttgatgaaatgtaatcattgcgatgaagtttcatggcagacgtgcgactttctgaaagccacttgtgaacattgtggcactgaaaatttagttattgaaggacctactacatgtgggtacctacctactaatgctgtagtgaaaatgccatgtcctgcctgtcaagacccagagattggacctgagcatagtgttgcagattatcacaaccactcaaacattgaaactcgactccgcaagggaggtaggactagatgttttggaggctgtgtgtttgcctatgttggctgctataataagcgtgcctactgggttcctcgtgctagtgctgatattggctcaggccatactggcattactggtgacaatgtggagaccttgaatgaggatctccttgagatactgagtcgtgaacgtgttaacattaacattgttggcgattttcatttgaatgaagaggttgccatcattttggcatctttctctgcttctacaagtgcctttattgacactataaagagtcttgattacaagtctttcaaaaccattgttgagtcctgcggtaactataaagttaccaagggaaagcccgtaaaaggtgcttggaacattggacaacagagatcagttttaacaccactgtgtggttttccctcacaggctgctggtgttatcagatcaatttttgcgcgcacacttgatgcagcaaaccactcaattcctgatttgcaaagagcagctgtcaccatacttgatggtatttctgaacagtcattacgtcttgtcgacgccatggtttatacttcagacctgctcaccaacagtgtcattattatggcatatgtaactggtggtcttgtacaacagacttctcagtggttgtctaatcttttgggcactactgttgaaaaactcaggcctatctttgaatggattgaggcgaaacttagtgcaggagttgaatttctcaaggatgcttgggagattctcaaatttctcattacaggtgtttttgacatcgtcaagggtcaaatacaggttgcttcagataacatcaaggattgtgtaaaatgcttcattgatgttgttaacaaggcactcgaaatgtgcattgatcaagtcactatcgctggcgcaaagttgcgatcactcaacttaggtgaagtcttcatcgctcaaagcaagggactttaccgtcagtgtatacgtggcaaggagcagctgcaactactcatgcctcttaaggcaccaaaagaagtaacctttcttgaaggtgattcacatgacacagtacttacctctgaggaggttgttctcaagaacggtgaactcgaagcactcgagacgcccgttgatagcttcacaaatggagctatcgttggcacaccagtctgtgtaaatggcctcatgctcttagagattaaggacaaagaacaatactgcgcattgtctcctggtttactggctacaaacaatgtctttcgcttaaaagggggtgcaccaattaaaggtgtaacctttggagaagatactgtttgggaagttcaaggttacaagaatgtgagaatcacatttgagcttgatgaacgtgttgacaaagtgcttaatgaaaagtgctctgtctacactgttgaatccggtaccgaagttactgagtttgcatgtgttgtagcagaggctgttgtgaagactttacaaccagtttctgatctccttaccaacatgggtattgatcttgatgagtggagtgtagctacattctacttatttgatgatgctggtgaagaaaacttttcatcacgtatgtattgttccttttaccctccagatgaggaagaagaggacgatgcagagtgtgaggaagaagaaattgatgaaacctgtgaacatgagtacggtacagaggatgattatcaaggtctccctctggaatttggtgcctcagctgaaacagttcgagttgaggaagaagaagaggaagactggctggatgatactactgagcaatcagagattgagccagaaccagaacctacacctgaagaaccagttaatcagtttactggttatttaaaacttactgacaatgttgccattaaatgtgttgacatcgttaaggaggcacaaagtgctaatcctatggtgattgtaaatgctgctaacatacacctgaaacatggtggtggtgtagcaggtgcactcaacaaggcaaccaatggtgccatgcaaaaggagagtgatgattacattaagctaaatggccctcttacagtaggagggtcttgtttgctttctggacataatcttgctaagaagtgtctgcatgttgttggacctaacctaaatgcaggtgaggacatccagcttcttaaggcagcatatgaaaatttcaattcacaggacatcttacttgcaccattgttgtcagcaggcatatttggtgctaaaccacttcagtctttacaagtgtgcgtgcagacggttcgtacacaggtttatattgcagtcaatgacaaagctctttatgagcaggttgtcatggattatcttgataacctgaagcctagagtggaagcacctaaacaagaggagccaccaaacacagaagattccaaaactgaggagaaatctgtcgtacagaagcctgtcgatgtgaagccaaaaattaaggcctgcattgatgaggttaccacaacactggaagaaactaagtttcttaccaataagttactcttgtttgctgatatcaatggtaagctttaccatgattctcagaacatgcttagaggtgaagatatgtctttccttgagaaggatgcaccttacatggtaggtgatgttatcactagtggtgatatcacttgtgttgtaataccctccaaaaaggctggtggcactactgagatgctctcaagagctttgaagaaagtgccagttgatgagtatataaccacgtaccctggacaaggatgtgctggttatacacttgaggaagctaagactgctcttaagaaatgcaaatctgcattttatgtactaccttcagaagcacctaatgctaaggaagagattctaggaactgtatcctggaatttgagagaaatgcttgctcatgctgaagagacaagaaaattaatgcctatatgcatggatgttagagccataatggcaaccatccaacgtaagtataaaggaattaaaattcaagagggcatcgttgactatggtgtccgattcttcttttatactagtaaagagcctgtagcttctattattacgaagctgaactctctaaatgagccgcttgtcacaatgccaattggttatgtgacacatggttttaatcttgaagaggctgcgcgctgtatgcgttctcttaaagctcctgccgtagtgtcagtatcatcaccagatgctgttactacatataatggatacctcacttcgtcatcaaagacatctgaggagcactttgtagaaacagtttctttggctggctcttacagagattggtcctattcaggacagcgtacagagttaggtgttgaatttcttaagcgtggtgacaaaattgtgtaccacactctggagagccccgtcgagtttcatcttgacggtgaggttctttcacttgacaaactaaagagtctcttatccctgcgggaggttaagactataaaagtgttcacaactgtggacaacactaatctccacacacagcttgtggatatgtctatgacatatggacagcagtttggtccaacatacttggatggtgctgatgttacaaaaattaaacctcatgtaaatcatgagggtaagactttctttgtactacctagtgatgacacactacgtagtgaagctttcgagtactaccatactcttgatgagagttttcttggtaggtacatgtctgctttaaaccacacaaagaaatggaaatttcctcaagttggtggtttaacttcaattaaatgggctgataacaattgttatttgtctagtgttttattagcacttcaacagcttgaagtcaaattcaatgcaccagcacttcaagaggcttattatagagcccgtgctggtgatgctgctaacttttgtgcactcatactcgcttacagtaataaaactgttggcgagcttggtgatgtcagagaaactatgacccatcttctacagcatgctaatttggaatctgcaaagcgagttcttaatgtggtgtgtaaacattgtggtcagaaaactactaccttaacgggtgtagaagctgtgatgtatatgggtactctatcttatgataatcttaagacaggtgtttccattccatgtgtgtgtggtcgtgatgctacacaatatctagtacaacaagagtcttcttttgttatgatgtctgcaccacctgctgagtataaattacagcaaggtacattcttatgtgcgaatgagtacactggtaactatcagtgtggtcattacactcatataactgctaaggagaccctctatcgtattgacggagctcaccttacaaagatgtcagagtacaaaggaccagtgactgatgttttctacaaggaaacatcttacactacaaccatcaagcctgtgtcgtataaactcgatggagttacttacacagagattgaaccaaaattggatgggtattataaaaaggataatgcttactatacagagcagcctatagaccttgtaccaactcaaccattaccaaatgcgagttttgataatttcaaactcacatgttctaacacaaaatttgctgatgatttaaatcaaatgacaggcttcacaaagccagcttcacgagagctatctgtcacattcttcccagacttgaatggcgatgtagtggctattgactatagacactattcagcgagtttcaagaaaggtgctaaattactgcataagccaattgtttggcacattaaccaggctacaaccaagacaacgttcaaaccaaacacttggtgtttacgttgtctttggagtacaaagccagtagatacttcaaattcatttgaagttctggcagtagaagacacacaaggaatggacaatcttgcttgtgaaagtcaacaacccacctctgaagaagtagtggaaaatcctaccatacagaaggaagtcatagagtgtgacgtgaaaactaccgaagttgtaggcaatgtcatacttaaaccatcagatgaaggtgttaaagtaacacaagagttaggtcatgaggatcttatggctgcttatgtggaaaacacatgcattaccattaagaaacctaatgagctttcactagccttaggtttaaaaacaattgccactcatggtattgctgcaattaatagtgttccttggagtaaaattttggcttatgtcaaaccattcttaggacaagcagcaattacaacatcaaattgcgctaagagattagcacaacgtgtgtttaacaattatatgccttatgtgtttacattattgttccaattgtgtacttttactaaaagtaccaattctagaattagagcttcactacctacaactattgctaaaaatagtgttaagagtgttgctaaattatgtttggatgccggcattaattatgtgaagtcacccaaattttctaaattgttcacaatcgctatgtggctattgttgttaagtatttgcttaggttctctaatctgtgtaactgctgcttttggtgtactcttatctaattttggtgctccttcttattgtaatggcgttagagaattgtatcttaattcgtctaacgttactactatggatttctgtgaaggttcttttccttgcagcatttgtttaagtggattagactcccttgattcttatccagctcttgaaaccattcaggtgacgatttcatcgtacaagctagacttgacaattttaggtctggccgctgagtgggttttggcatatatgttgttcacaaaattcttttatttattaggtctttcagctataatgcaggtgttctttggctattttgctagtcatttcatcagcaattcttggctcatgtggtttatcattagtattgtacaaatggcacccgtttctgcaatggttaggatgtacatcttctttgcttctttctactacatatggaagagctatgttcatatcatggatggttgcacctcttcgacttgcatgatgtgctataagcgcaatcgtgccacacgcgttgagtgtacaactattgttaatggcatgaagagatctttctatgtctatgcaaatggaggccgtggcttctgcaagactcacaattggaattgtctcaattgtgacacattttgcactggtagtacattcattagtgatgaagttgctcgtgatttgtcactccagtttaaaagaccaatcaaccctactgaccagtcatcgtatattgttgatagtgttgctgtgaaaaatggcgcgcttcacctctactttgacaaggctggtcaaaagacctatgagagacatccgctctcccattttgtcaatttagacaatttgagagctaacaacactaaaggttcactgcctattaatgtcatagtttttgatggcaagtccaaatgcgacgagtctgcttctaagtctgcttctgtgtactacagtcagctgatgtgccaacctattctgttgcttgaccaagctcttgtatcagacgttggagatagtactgaagtttccgttaagatgtttgatgcttatgtcgacaccttttcagcaacttttagtgttcctatggaaaaacttaaggcacttgttgctacagctcacagcgagttagcaaagggtgtagctttagatggtgtcctttctacattcgtgtcagctgcccgacaaggtgttgttgataccgatgttgacacaaaggatgttattgaatgtctcaaactttcacatcactctgacttagaagtgacaggtgacagttgtaacaatttcatgctcacctataataaggttgaaaacatgacgcccagagatcttggcgcatgtattgactgtaatgcaaggcatatcaatgcccaagtagcaaaaagtcacaatgtttcactcatctggaatgtaaaagactacatgtctttatctgaacagctgcgtaaacaaattcgtagtgctgccaagaagaacaacataccttttagactaacttgtgctacaactagacaggttgtcaatgtcataactactaaaatctcactcaagggtggtaagattgttagtacttgttttaaacttatgcttaaggccacattattgtgcgttcttgctgcattggtttgttatatcgttatgccagtacatacattgtcaatccatgatggttacacaaatgaaatcattggttacaaagccattcaggatggtgtcactcgtgacatcatttctactgatgattgttttgcaaataaacatgctggttttgacgcatggtttagccagcgtggtggttcatacaaaaatgacaaaagctgccctgtagtagctgctatcattacaagagagattggtttcatagtgcctggcttaccgggtactgtgctgagagcaatcaatggtgacttcttgcattttctacctcgtgtttttagtgctgttggcaacatttgctacacaccttccaaactcattgagtatagtgattttgctacctctgcttgcgttcttgctgctgagtgtacaatttttaaggatgctatgggcaaacctgtgccatattgttatgacactaatttgctagagggttctatttcttatagtgagcttcgtccagacactcgttatgtgcttatggatggttccatcatacagtttcctaacacttacctggagggttctgttagagtagtaacaacttttgatgctgagtactgtagacatggtacatgcgaaaggtcagaagtaggtatttgcctatctaccagtggtagatgggttcttaataatgagcattacagagctctatcaggagttttctgtggtgttgatgcgatgaatctcatagctaacatctttactcctcttgtgcaacctgtgggtgctttagatgtgtctgcttcagtagtggctggtggtattattgccatattggtgacttgtgctgcctactactttatgaaattcagacgtgtttttggtgagtacaaccatgttgttgctgctaatgcacttttgtttttgatgtctttcactatactctgtctggtaccagcttacagctttctgccgggagtctactcagtcttttacttgtacttgacattctatttcaccaatgatgtttcattcttggctcaccttcaatggtttgccatgttttctcctattgtgcctttttggataacagcaatctatgtattctgtatttctctgaagcactgccattggttctttaacaactatcttaggaaaagagtcatgtttaatggagttacatttagtaccttcgaggaggctgctttgtgtacctttttgctcaacaaggaaatgtacctaaaattgcgtagcgagacactgttgccacttacacagtataacaggtatcttgctctatataacaagtacaagtatttcagtggagccttagatactaccagctatcgtgaagcagcttgctgccacttagcaaaggctctaaatgactttagcaactcaggtgctgatgttctctaccaaccaccacagacatcaatcacttctgctgttctgcagagtggttttaggaaaatggcattcccgtcaggcaaagttgaagggtgcatggtacaagtaacctgtggaactacaactcttaatggattgtggttggatgacacagtatactgtccaagacatgtcatttgcacagcagaagacatgcttaatcctaactatgaagatctgctcattcgcaaatccaaccatagctttcttgttcaggctggcaatgttcaacttcgtgttattggccattctatgcaaaattgtctgcttaggcttaaagttgatacttctaaccctaagacacccaagtataaatttgtccgtatccaacctggtcaaacattttcagttctagcatgctacaatggttcaccatctggtgtttatcagtgtgccatgagacctaatcataccattaaaggttctttccttaatggatcatgtggtagtgttggttttaacattgattatgattgcgtgtctttctgctatatgcatcatatggagcttccaacaggagtacacgctggtactgacttagaaggtaaattctatggtccatttgttgacagacaaactgcacaggctgcaggtacagacacaaccataacattaaatgttttggcatggctgtatgctgctgttatcaatggtgataggtggtttcttaatagattcaccactactttgaatgactttaaccttgtggcaatgaagtacaactatgaacctttgacacaagatcatgttgacatattgggacctctttctgctcaaacaggaattgccgtcttagatatgtgtgctgctttgaaagagctgctgcagaatggtatgaatggtcgtactatccttggtagcactattttagaagatgagtttacaccatttgatgttgttagacaatgctctggtgttaccttccaaggtaagttcaagaaaattgttaagggcactcatcattggatgcttttaactttcttgacatcactattgattcttgttcaaagtacacagtggtcactgtttttctttgtttacgagaatgctttcttgccatttactcttggtattatggcaattgctgcatgtgctatgctgcttgttaagcataagcacgcattcttgtgcttgtttctgttaccttctcttgcaacagttgcttactttaatatggtctacatgcctgctagctgggtgatgcgtatcatgacatggcttgaattggctgacactagcttgtctggttataggcttaaggattgtgttatgtatgcttcagctttagttttgcttattctcatgacagctcgcactgtttatgatgatgctgctagacgtgtttggacactgatgaatgtcattacacttgtttacaaagtctactatggtaatgctttagatcaagctatttccatgtgggccttagttatttctgtaacctctaactattctggtgtcgttacgactatcatgtttttagctagagctatagtgtttgtgtgtgttgagtattacccattgttatttattactggcaacaccttacagtgtatcatgcttgtttattgtttcttaggctattgttgctgctgctactttggccttttctgtttactcaaccgttacttcaggcttactcttggtgtttatgactacttggtctctacacaagaatttaggtatatgaactcccaggggcttttgcctcctaagagtagtattgatgctttcaagcttaacattaagttgttgggtattggaggtaaaccatgtatcaaggttgctactgtacagtctaaaatgtctgacgtaaagtgcacatctgtggtactgctctcggttcttcaacaacttagagtagagtcatcttctaaattgtgggcacaatgtgtacaactccacaatgatattcttcttgcaaaagacacaactgaagctttcgagaagatggtttctcttttgtctgttttgctatccatgcagggtgctgtagacattaataggttgtgcgaggaaatgctcgataaccgtgctactcttcaggctattgcttcagaatttagttctttaccatcatatgccgcttatgccactgcccaggaggcctatgagcaggctgtagctaatggtgattctgaagtcgttctcaaaaagttaaagaaatctttgaatgtggctaaatctgagtttgaccgtgatgctgccatgcaacgcaagttggaaaagatggcagatcaggctatgacccaaatgtacaaacaggcaagatctgaggacaagagggcaaaagtaactagtgctatgcaaacaatgctcttcactatgcttaggaagcttgataatgatgcacttaacaacattatcaacaatgcgcgtgatggttgtgttccactcaacatcataccattgactacagcagccaaactcatggttgttgtccctgattatggtacctacaagaacacttgtgatggtaacacctttacatatgcatctgcactctgggaaatccagcaagttgttgatgcggatagcaagattgttcaacttagtgaaattaacatggacaattcaccaaatttggcttggcctcttattgttacagctctaagagccaactcagctgttaaactacagaataatgaactgagtccagtagcactacgacagatgtcctgtgcggctggtaccacacaaacagcttgtactgatgacaatgcacttgcctactataacaattcgaagggaggtaggtttgtgctggcattactatcagaccaccaagatctcaaatgggctagattccctaagagtgatggtacaggtacaatttacacagaactggaaccaccttgtaggtttgttacagacacaccaaaagggcctaaagtgaaatacttgtacttcatcaaaggcttaaacaacctaaatagaggtatggtgctgggcagtttagctgctacagtacgtcttcaggctggaaatgctacagaagtacctgccaattcaactgtgctttccttctgtgcttttgcagtagaccctgctaaagcatataaggattacctagcaagtggaggacaaccaatcaccaactgtgtgaagatgttgtgtacacacactggtacaggacaggcaattactgtaacaccagaagctaacatggaccaagagtcctttggtggtgcttcatgttgtctgtattgtagatgccacattgaccatccaaatcctaaaggattctgtgacttgaaaggtaagtacgtccaaatacctaccacttgtgctaatgacccagtgggttttacacttagaaacacagtctgtaccgtctgcggaatgtggaaaggttatggctgtagttgtgaccaactccgcgaacccttgatgcagtctgcggatgcatcaacgtttttaaacgggtttgcggtgtaagtgcagcccgtcttacaccgtgcggcacaggcactagtactgatgtcgtctacagggcttttgatatttacaacgaaaaagttgctggttttgcaaagttcctaaaaactaattgctgtcgcttccaggagaaggatgaggaaggcaatttattagactcttactttgtagttaagaggcatactatgtctaactaccaacatgaagagactatttataacttggttaaagattgtccagcggttgctgtccatgactttttcaagtttagagtagatggtgacatggtaccacatatatcacgtcagcgtctaactaaatacacaatggctgatttagtctatgctctacgtcattttgatgagggtaattgtgatacattaaaagaaatactcgtcacatacaattgctgtgatgatgattatttcaataagaaggattggtatgacttcgtagagaatcctgacatcttacgcgtatatgctaacttaggtgagcgtgtacgccaatcattattaaagactgtacaattctgcgatgctatgcgtgatgcaggcattgtaggcgtactgacattagataatcaggatcttaatgggaactggtacgatttcggtgatttcgtacaagtagcaccaggctgcggagttcctattgtggattcatattactcattgctgatgcccatcctcactttgactagggcattggctgctgagtcccatatggatgctgatctcgcaaaaccacttattaagtgggatttgctgaaatatgattttacggaagagagactttgtctcttcgaccgttattttaaatattgggaccagacataccatcccaattgtattaactgtttggatgataggtgtatccttcattgtgcaaactttaatgtgttattttctactgtgtttccacctacaagttttggaccactagtaagaaaaatatttgtagatggtgttccttttgttgtttcaactggataccattttcgtgagttaggagtcgtacataatcaggatgtaaacttacatagctcgcgtctcagtttcaaggaacttttagtgtatgctgctgatccagctatgcatgcagcttctggcaatttattgctagataaacgcactacatgcttttcagtagctgcactaacaaacaatgttgcttttcaaactgtcaaacccggtaattttaataaagacttttatgactttgctgtgtctaaaggtttctttaaggaaggaagttctgttgaactaaaacacttcttctttgctcaggatggcaacgctgctatcagtgattatgactattatcgttataatctgccaacaatgtgtgatatcagacaactcctattcgtagttgaagttgttgataaatactttgattgttacgatggtggctgtattaatgccaaccaagtaatcgttaacaatctggataaatcagctggtttcccatttaataaatggggtaaggctagactttattatgactcaatgagttatgaggatcaagatgcacttttcgcgtatactaagcgtaatgtcatccctactataactcaaatgaatcttaagtatgccattagtgcaaagaatagagctcgcaccgtagctggtgtctctatctgtagtactatgacaaatagacagtttcatcagaaattattgaagtcaatagccgccactagaggagctactgtggtaattggaacaagcaagttttacggtggctggcataatatgttaaaaactgtttacagtgatgtagaaactccacaccttatgggttgggattatccaaaatgtgacagagccatgcctaacatgcttaggataatggcctctcttgttcttgctcgcaaacataacacttgctgtaacttatcacaccgtttctacaggttagctaacgagtgtgcgcaagtattaagtgagatggtcatgtgtggcggctcactatatgttaaaccaggtggaacatcatccggtgatgctacaactgcttatgctaatagtgtctttaacatttgtcaagctgttacagccaatgtaaatgcacttctttcaactgatggtaataagatagctgacaagtatgtccgcaatctacaacacaggctctatgagtgtctctatagaaatagggatgttgatcatgaattcgtggatgagttttacgcttacctgcgtaaacatttctccatgatgattctttctgatgatgccgttgtgtgctataacagtaactatgcggctcaaggtttagtagctagcattaagaactttaaggcagttctttattatcaaaataatgtgttcatgtctgaggcaaaatgttggactgagactgaccttactaaaggacctcacgaattttgctcacagcatacaatgctagttaaacaaggagatgattacgtgtacctgccttacccagatccatcaagaatattaggcgcaggctgttttgtcgatgatattgtcaaaacagatggtacacttatgattgaaaggttcgtgtcactggctattgatgcttacccacttacaaaacatcctaatcaggagtatgctgatgtctttcacttgtatttacaatacattagaaagttacatgatgagcttactggccacatgttggacatgtattccgtaatgctaactaatgataacacctcacggtactgggaacctgagttttatgaggctatgtacacaccacatacagtcttgcaggctgtaggtgcttgtgtattgtgcaattcacagacttcacttcgttgcggtgcctgtattaggagaccattcctatgttgcaagtgctgctatgaccatgtcatttcaacatcacacaaattagtgttgtctgttaatccctatgtttgcaatgccccaggttgtgatgtcactgatgtgacacaactgtatctaggaggtatgagctattattgcaagtcacataagcctcccattagttttccattatgtgctaatggtcaggtttttggtttatacaaaaacacatgtgtaggcagtgacaatgtcactgacttcaatgcgatagcaacatgtgattggactaatgctggcgattacatacttgccaacacttgtactgagagactcaagcttttcgcagcagaaacgctcaaagccactgaggaaacatttaagctgtcatatggtattgccactgtacgcgaagtactctctgacagagaattgcatctttcatgggaggttggaaaacctagaccaccattgaacagaaactatgtctttactggttaccgtgtaactaaaaatagtaaagtacagattggagagtacacctttgaaaaaggtgactatggtgatgctgttgtgtacagaggtactacgacatacaagttgaatgttggtgattactttgtgttgacatctcacactgtaatgccacttagtgcacctactctagtgccacaagagcactatgtgagaattactggcttgtacccaacactcaacatctcagatgagttttctagcaatgttgcaaattatcaaaaggtcggcatgcaaaagtactctacactccaaggaccacctggtactggtaagagtcattttgccatcggacttgctctctattacccatctgctcgcatagtgtatacggcatgctctcatgcagctgttgatgccctatgtgaaaaggcattaaaatatttgcccatagataaatgtagtagaatcatacctgcgcgtgcgcgcgtagagtgttttgataaattcaaagtgaattcaacactagaacagtatgttttctgcactgtaaatgcattgccagaaacaactgctgacattgtagtctttgatgaaatctctatggctactaattatgacttgagtgttgtcaatgctagacttcgtgcaaaacactacgtctatattggcgatcctgctcaattaccagccccccgcacattgctgactaaaggcacactagaaccagaatattttaattcagtgtgcagacttatgaaaacaataggtccagacatgttccttggaacttgtcgccgttgtcctgctgaaattgttgacactgtgagtgctttagtttatgacaataagctaaaagcacacaaggataagtcagctcaatgcttcaaaatgttctacaaaggtgttattacacatgatgtttcatctgcaatcaacagacctcaaataggcgttgtaagagaatttcttacacgcaatcctgcttggagaaaagctgtttttatctcaccttataattcacagaacgctgtagcttcaaaaatcttaggattgcctacgcagactgttgattcatcacagggttctgaatatgactatgtcatattcacacaaactactgaaacagcacactcttgtaatgtcaaccgcttcaatgtggctatcacaagggcaaaaattggcattttgtgcataatgtctgatagagatctttatgacaaactgcaatttacaagtctagaaataccacgtcgcaatgtggctacattacaagcagaaaatgtaactggactttttaaggactgtagtaagatcattactggtcttcatcctacacaggcacctacacacctcagcgttgatataaagttcaagactgaaggattatgtgttgacataccaggcataccaaaggacatgacctaccgtagactcatctctatgatgggtttcaaaatgaattaccaagtcaatggttaccctaatatgtttatcacccgcgaagaagctattcgtcacgttcgtgcgtggattggctttgatgtagagggctgtcatgcaactagagatgctgtgggtactaacctacctctccagctaggattttctacaggtgttaacttagtagctgtaccgactggttatgttgacactgaaaataacacagaattcaccagagttaatgcaaaacctccaccaggtgaccagtttaaacatcttataccactcatgtataaaggcttgccctggaatgtagtgcgtattaagatagtacaaatgctcagtgatacactgaaaggattgtcagacagagtcgtgttcgtcctttgggcgcatggctttgagcttacatcaatgaagtactttgtcaagattggacctgaaagaacgtgttgtctgtgtgacaaacgtgcaacttgcttttctacttcatcagatacttatgcctgctggaatcattctgtgggttttgactatgtctataacccatttatgattgatgttcagcagtggggctttacgggtaaccttcagagtaaccatgaccaacattgccaggtacatggaaatgcacatgtggctagttgtgatgctatcatgactagatgtttagcagtccatgagtgctttgttaagcgcgttgattggtctgttgaataccctattataggagatgaactgagggttaattctgcttgcagaaaagtacaacacatggttgtgaagtctgcattgcttgctgataagtttccagttcttcatgacattggaaatccaaaggctatcaagtgtgtgcctcaggctgaagtagaatggaagttctacgatgctcagccatgtagtgacaaagcttacaaaatagaggaactcttctattcttatgctacacatcacgataaattcactgatggtgtttgtttgttttggaattgtaacgttgatcgttacccagccaatgcaattgtgtgtaggtttgacacaagagtcttgtcaaacttgaacttaccaggctgtgatggtggtagtttgtatgtgaataagcatgcattccacactccagctttcgataaaagtgcatttactaatttaaagcaattgcctttcttttactattctgatagtccttgtgagtctcatggcaaacaagtagtgtcggatattgattatgttccactcaaatctgctacgtgtattacacgatgcaatttaggtggtgctgtttgcagacaccatgcaaatgagtaccgacagtacttggatgcatataatatgatgatttctgctggatttagcctatggatttacaaacaatttgatacttataacctgtggaatacatttaccaggttacagagtttagaaaatgtggcttataatgttgttaataaaggacactttgatggacacgccggcgaagcacctgtttccatcattaataatgctgtttacacaaaggtagatggtattgatgtggagatctttgaaaataagacaacacttcctgttaatgttgcatttgagctttgggctaagcgtaacattaaaccagtgccagagattaagatactcaataatttgggtgttgatatcgctgctaatactgtaatctgggactacaaaagagaagccccagcacatgtatctacaataggtgtctgcacaatgactgacattgccaagaaacctactgagagtgcttgttcttcacttactgtcttgtttgatggtagagtggaaggacaggtagacctttttagaaacgcccgtaatggtgttttaataacagaaggttcagtcaaaggtctaacaccttcaaagggaccagcacaagctagcgtcaatggagtcacattaattggagaatcagtaaaaacacagtttaactactttaagaaagtagacggcattattcaacagttgcctgaaacctactttactcagagcagagacttagaggattttaagcccagatcacaaatggaaactgactttctcgagctcgctatggatgaattcatacagcgatataagctcgagggctatgccttcgaacacatcgtttatggagatttcagtcatggacaacttggcggtcttcatttaatgataggcttagccaagcgctcacaagattcaccacttaaattagaggattttatccctatggacagcacagtgaaaaattacttcataacagatgcgcaaacaggttcatcaaaatgtgtgtgttctgtgattgatcttttacttgatgactttgtcgagataataaagtcacaagatttgtcagtgatttcaaaagtggtcaaggttacaattgactatgctgaaatttcattcatgctttggtgtaaggatggacatgttgaaaccttctacccaaaactacaagcaagtcaagcgtggcaaccaggtgttgcgatgcctaacttgtacaagatgcaaagaatgcttcttgaaaagtgtgaccttcagaattatggtgaaaatgctgttataccaaaaggaataatgatgaatgtcgcaaagtatactcaactgtgtcaatacttaaatacacttactttagctgtaccctacaacatgagagttattcactttggtgctggctctgataaaggagttgcaccaggtacagctgtgctcagacaatggttgccaactggcacactacttgtcgattcagatcttaatgacttcgtctccgacgcagattctactttaattggagactgtgcaacagtacatacggctaataaatgggaccttattattagcgatatgtatgaccctaggaccaaacatgtgacaaaagagaatgactctaaagaagggtttttcacttatctgtgtggatttataaagcaaaaactagccctgggtggttctatagctgtaaagataacagagcattcttggaatgctgacctttacaagcttatgggccatttctcatggtggacagcttttgttacaaatgtaaatgcatcatcatcggaagcatttttaattggggctaactatcttggcaagccgaaggaacaaattgatggctataccatgcatgctaactacattttctggaggaacacaaatcctatccagttgtcttcctattcactctttgacatgagcaaatttcctcttaaattaagaggaactgctgtaatgtctcttaaggagaatcaaatcaatgatatgatttattctcttctggaaaaaggtaggcttatcattagagaaaacaacagagttgtggtttcaagtgatattcttgttaacaactaaacgaacatgtttattttcttattatttcttactctcactagtggtagtgaccttgaccggtgcaccacttttgatgatgttcaagctcctaattacactcaacatacttcatctatgaggggggtttactatcctgatgaaatttttagatcagacactctttatttaactcaggatttatttcttccattttattctaatgttacagggtttcatactattaatcatacgtttggcaaccctgtcataccttttaaggatggtatttattttgctgccacagagaaatcaaatgttgtccgtggttgggtttttggttctaccatgaacaacaagtcacagtcggtgattattattaacaattctactaatgttgttatacgagcatgtaactttgaattgtgtgacaaccctttctttgctgtttctaaacccatgggtacacagacacatactatgatattcgataatgcatttaattgcactttcgagtacatatctgatgccttttcgcttgatgtttcagaaaagtcaggtaattttaaacacttacgagagtttgtgtttaaaaataaagatgggtttctctatgtttataagggctatcaacctatagatgtagttcgtgatctaccttctggttttaacactttgaaacctatttttaagttgcctcttggtattaacattacaaattttagagccattcttacagccttttcacctgctcaagacatttggggcacgtcagctgcagcctattttgttggctatttaaagccaactacatttatgctcaagtatgatgaaaatggtacaatcacagatgctgttgattgttctcaaaatccacttgctgaactcaaatgctctgttaagagctttgagattgacaaaggaatttaccagacctctaatttcagggttgttccctcaggagatgttgtgagattccctaatattacaaacttgtgtccttttggagaggtttttaatgctactaaattcccttctgtctatgcatgggagagaaaaaaaatttctaattgtgttgctgattactctgtgctctacaactcaacatttttttcaacctttaagtgctatggcgtttctgccactaagttgaatgatctttgcttctccaatgtctatgcagattcttttgtagtcaagggagatgatgtaagacaaatagcgccaggacaaactggtgttattgctgattataattataaattgccagatgatttcatgggttgtgtccttgcttggaatactaggaacattgatgctacttcaactggtaattataattataaatataggtatcttagacatggcaagcttaggccctttgagagagacatatctaatgtgcctttctcccctgatggcaaaccttgcaccccacctgctcttaattgttattggccattaaatgattatggtttttacaccactactggcattggctaccaaccttacagagttgtagtactttcttttgaacttttaaatgcaccggccacggtttgtggaccaaaattatccactgaccttattaagaaccagtgtgtcaattttaattttaatggactcactggtactggtgtgttaactccttcttcaaagagatttcaaccatttcaacaatttggccgtgatgtttctgatttcactgattccgttcgagatcctaaaacatctgaaatattagacatttcaccttgctcttttgggggtgtaagtgtaattacacctggaacaaatgcttcatctgaagttgctgttctatatcaagatgttaactgcactgatgtttctacagcaattcatgcagatcaactcacaccagcttggcgcatatattctactggaaacaatgtattccagactcaagcaggctgtcttataggagctgagcatgtcgacacttcttatgagtgcgacattcctattggagctggcatttgtgctagttaccatacagtttctttattacgtagtactagccaaaaatctattgtggcttatactatgtctttaggtgctgatagttcaattgcttactctaataacaccattgctatacctactaacttttcaattagcattactacagaagtaatgcctgtttctatggctaaaacctccgtagattgtaatatgtacatctgcggagattctactgaatgtgctaatttgcttctccaatatggtagcttttgcacacaactaaatcgtgcactctcaggtattgctgctgaacaggatcgcaacacacgtgaagtgttcgctcaagtcaaacaaatgtacaaaaccccaactttgaaatattttggtggttttaatttttcacaaatattacctgaccctctaaagccaactaagaggtcttttattgaggacttgctctttaataaggtgacactcgctgatgctggcttcatgaagcaatatggcgaatgcctaggtgatattaatgctagagatctcatttgtgcgcagaagttcaatggacttacagtgttgccacctctgctcactgatgatatgattgctgcctacactgctgctctagttagtggtactgccactgctggatggacatttggtgctggcgctgctcttcaaataccttttgctatgcaaatggcatataggttcaatggcattggagttacccaaaatgttctctatgagaaccaaaaacaaatcgccaaccaatttaacaaggcgattagtcaaattcaagaatcacttacaacaacatcaactgcattgggcaagctgcaagacgttgttaaccagaatgctcaagcattaaacacacttgttaaacaacttagctctaattttggtgcaatttcaagtgtgctaaatgatatcctttcgcgacttgataaagtcgaggcggaggtacaaattgacaggttaattacaggcagacttcaaagccttcaaacctatgtaacacaacaactaatcagggctgctgaaatcagggcttctgctaatcttgctgctactaaaatgtctgagtgtgttcttggacaatcaaaaagagttgacttttgtggaaagggctaccaccttatgtccttcccacaagcagccccgcatggtgttgtcttcctacatgtcacgtatgtgccatcccaggagaggaacttcaccacagcgccagcaatttgtcatgaaggcaaagcatacttccctcgtgaaggtgtttttgtgtttaatggcacttcttggtttattacacagaggaacttcttttctccacaaataattactacagacaatacatttgtctcaggaaattgtgatgtcgttattggcatcattaacaacacagtttatgatcctctgcaacctgagcttgactcattcaaagaagagctggacaagtacttcaaaaatcatacatcaccagatgttgatcttggcgacatttcaggcattaacgcttctgtcgtcaacattcaaaaagaaattgaccgcctcaatgaggtcgctaaaaatttaaatgaatcactcattgaccttcaagaattgggaaaatatgagcaatatattaaatggccttggtatgtttggctcggcttcattgctggactaattgccatcgtcatggttacaatcttgctttgttgcatgactagttgttgcagttgcctcaagggtgcatgctcttgtggttcttgctgcaagtttgatgaggatgactctgagccagttctcaagggtgtcaaattacattacacataaacgaacttatggatttgtttatgagattttttactcttggatcaattactgcacagccagtaaaaattgacaatgcttctcctgcaagtactgttcatgctacagcaacgataccgctacaagcctcactccctttcggatggcttgttattggcgttgcatttcttgctgtttttcagagcgctaccaaaataattgcgctcaataaaagatggcagctagccctttataagggcttccagttcatttgcaatttactgctgctatttgttaccatctattcacatcttttgcttgtcgctgcaggtatggaggcgcaatttttgtacctctatgccttgatatattttctacaatgcatcaacgcatgtagaattattatgagatgttggctttgttggaagtgcaaatccaagaacccattactttatgatgccaactactttgtttgctggcacacacataactatgactactgtataccatataacagtgtcacagatacaattgtcgttactgaaggtgacggcatttcaacaccaaaactcaaagaagactaccaaattggtggttattctgaggataggcactcaggtgttaaagactatgtcgttgtacatggctatttcaccgaagtttactaccagcttgagtctacacaaattactacagacactggtattgaaaatgctacattcttcatctttaacaagcttgttaaagacccaccgaatgtgcaaatacacacaatcgacggctcttcaggagttgctaatccagcaatggatccaatttatgatgagccgacgacgactactagcgtgcctttgtaagcacaagaaagtgagtacgaacttatgtactcattcttttcggaagaaacaggtacgttaatagttaatagcgtacttctttttcttgctttcgtggtattcttgctagtcacactagccatccttactgcgcttcgattgtgtgcgtactgctgcaatattgttaacgtgagtttagtaaaaccaacggtttacgtctactcgcgtgttaaaaatctgaactcttctgaaggagttcctgatcttctggtctaaacgaactaactattattattattctgtttggaactttaacattgcttatcatggcagacaacggtactattaccgttgaggagcttaaacaactcctggaacaatggaacctagtaataggtttcctatgcctagcctggattatgttactacaatttgcctattctaatcggaacaggtttttgtacataataaagcttgttttcctctggctcttgtggccagtaacacttgcttgttttgtgcttgctgctgtctacagaattaattgggtgactggcgggattgcgattgcaatggcttgtattgtaggcttgatgtggcttagctacttcgttgcttccttcaggctgtttgctcgtacccgctcaatgtggtcattcaacccagaaacaaacattcttctcaatgtgcctctccgggggacaattgtgaccagaccgctcatggaaagtgaacttgtcattggtgctgtgatcattcgtggtcacttgcgaatggccggacactccctagggcgctgtgacattaaggacctgccaaaagagatcactgtggctacatcacgaacgctttcttattacaaattaggagcgtcgcagcgtgtaggcactgattcaggttttgctgcatacaaccgctaccgtattggaaactataaattaaatacagaccacgccggtagcaacgacaatattgctttgctagtacagtaagtgacaacagatgtttcatcttgttgacttccaggttacaatagcagagatattgattatcattatgaggactttcaggattgctatttggaatcttgacgttataataagttcaatagtgagacaattatttaagcctctaactaagaagaattattcggagttagatgatgaagaacctatggagttagattatccataaaacgaacatgaaaattattctcttcctgacattgattgtatttacatcttgcgagctatatcactatcaggagtgtgttagaggtacgactgtactactaaaagaaccttgcccatcaggaacatacgagggcaattcaccatttcaccctcttgctgacaataaatttgcactaacttgcactagcacacactttgcttttgcttgtgctgacggtactcgacatacctatcagctgcgtgcaagatcagtttcaccaaaacttttcatcagacaagaggaggttcaacaagagctctactcgccactttttctcattgttgctgctctagtatttttaatactttgcttcaccattaagagaaagacagaatgaatgagctcactttaattgacttctatttgtgctttttagcctttctgctattccttgttttaataatgcttattatattttggttttcactcgaaatccaggatctagaagaaccttgtaccaaagtctaaacgaacatgaaacttctcattgttttgacttgtatttctctatgcagttgcatatgcactgtagtacagcgctgtgcatctaataaacctcatgtgcttgaagatccttgaggtacaacactaggggtaatacttatagcactgcttggctttgtgctctaggaaaggttttaccttttcatagatggcacactatggttcaaacatgcacacctaatgttactatcaactgtcaagatccagctggtggtgcgcttatagctaggtgttggtaccttcatgaaggtcaccaaactgctgcatttagagacgtacttgttgttttaaataaacgaacaaattaaaatgtctgataatggaccccaatcaaaccaacgtagtgccccccgcattacatttggtggacccacagattcaactgacaataaccagaatggaggacgcaatggggcaaggccaaaacagcgccgaccccaaggtttacccaataatactgcgtcttggttcacagctctcactcagcatggcaaggaggaacttagattccctcgaggccagggcgttccaatcaacaccaatagtggtccagatgaccaaattggctactaccgaagagctacccgacgagttcgtggtggtgacggcaaaatgaaagagctcagccccagatggtacttctattacctaggaactggcccagaagcttcacttccctacggcgctaacaaagaaggcatcgtatgggttgcaactgagggagccttgaatacacccaaagaccacattggcacccgcaatcctaataacaatgctgccaccgtgctacaacttcctcaaggaacaacattgccaaaaggcttctacgcagagggaagcagaggcggcagtcaagcctcttctcgctcctcatcacgtagtcgcggtaattcaagaaattcaactcctggcagcagtaggggaaattctcctgctcgaatggctagcggaggtggtgaaactgccctcgcgctattgctgctagacagattgaaccagcttgagagcaaagtttctggtaaaggccaacaacaacaaggccaaactgtcactaagaaatctgctgctgaggcatctaaaaagcctcgccaaaaacgtactgccacaaaacagtacaacgtcactcaagcatttgggagacgtggtccagaacaaacccaaggaaatttcggggaccaagacctaatcagacaaggaactgattacaaacattggccgcaaattgcacaatttgctccaagtgcctctgcattctttggaatgtcacgcattggcatggaagtcacaccttcgggaacatggctgacttatcatggagccattaaattggatgacaaagatccacaattcaaagacaacgtcatactgctgaacaagcacattgacgcatacaaaacattcccaccaacagagcctaaaaaggacaaaaagaaaaagactgatgaagctcagcctttgccgcagagacaaaagaagcagcccactgtgactcttcttcctgcggctgacatggatgatttctccagacaacttcaaaattccatgagtggagcttctgctgattcaactcaggcataaacactcatgatgaccacacaaggcagatgggctatgtaaacgttttcgcaattccgtttacgatacatagtctactcttgtgcagaatgaattctcgtaactaaacagcacaagtaggtttagttaactttaatctcacatagcaatctttaatcaatgtgtaacattagggaggacttgaaagagccaccacattttcatcgaggccacgcggagtacgatcgagggtacagtgaataatgctagggagagctgcctatatggaagagccctaatgtgtaaaattaattttagtagtgctatccccatgtgattttaatagcttcttaggagaatgacaaaaaaaaaaaaaaa

SEQ ID NO: 29819 - DNA, 29013 bp, SARS Coronavirus
tctgtgtagctgtcgctcggctgcatgcctagtgcacctacgcagtataaacaataataaattttactgtcgttgacaagaaacgagtaactcgtccctcttctgcagactgcttacggtttcgtccgtgttgcagtcgatcatcagcatacctaggtttcgtccgggtgtgaccgaaaggtaagatggagagccttgttcttggtgtcaacgagaaaacacacgtccaactcagtttgcctgtccttcaggttagagacgtgctagtgcgtggcttcggggactctgtggaagaggccctatcggaggcacgtgaacacctcaaaaatggcacttgtggtctagtagagctggaaaaaggcgtactgccccagcttgaacagccctatgtgttcattaaacgttctgatgccttaagcaccaatcacggccacaaggtcgttgagctggttgcagaaatggacggcattcagtacggtcgtagcggtataacactgggagtactcgtgccacatgtgggcgaaaccccaattgcataccgcaatgttcttcttcgtaagaacggtaataagggagccggtggtcatagctatggcatcgatctaaagtcttatgacttaggtgacgagcttggcactgatcccattgaagattatgaacaaaactggaacactaagcatggcagtggtgcactccgtgaactcactcgtgagctcaatggaggtgcagtcactcgctatgtcgacaacaatttctgtggcccagatgggtaccctcttgattgcatcaaagattttctcgcacgcgcgggcaagtcaatgtgcactctttccgaacaacttgattacatcgagtcgaagagaggtgtctactgctgccgtgaccatgaacatgaaattgcctggttcactgagcgctctgataagagctacgagcaccagacacccttcgaaattaagagtgccaagaaatttgacactttcaaaggggaatgcccaaagtttgtgtttcctcttaactcaaaagtcaaagtcattcaaccacgtgttgaaaagaaaaagactgagggtttcatggggcgtatacgctctgtgtaccctgttgcatctccacaggagtgtaacaatatgcacttgtctaccttgatgaaatgtaatcattgcgatgaagtttcatggcagacgtgcgactttctgaaagccacttgtgaacattgtggcactgaaaatttagttattgaaggacctactacatgtgggtacctacctactaatgctgtagtgaaaatgccatgtcctgcctgtcaagacccagagattggacctgagcatagtgttgcagattatcacaaccactcaaacattgaaactcgactccgcaagggaggtaggactagatgttttggaggctgtgtgtttgcctatgttggctgctataataagcgtgcctactgggttcctcgtgctagtgctgatattggctcaggccatactggcattactggtgacaatgtggagaccttgaatgaggatctccttgagatactgagtcgtgaacgtgttaacattaacattgttggcgattttcatttgaatgaagaggttgccatcattttggcatctttctctgcttctacaagtgcctttattgacactataaagagtcttgattacaagtctttcmaaaccattgttgagtcctgcggtaactataaagttaccaagggaaagcccgtaaaaggtgcttggaacattggacaacagagatcagttttaacaccactgtgtggttttccctcacaggctgctggtgttatcagatcaatttttgcgcgcacacttgatgcagcaaaccactcaattcctgatttgcaaagagcagctgtcaccatacttgatggtatttctgaacagtcattacgtcttgtcgacgccatggtttatacttcagacctgctcaccaacagtgtcattattatggcatatgtaactggtggtcttgtacaacagacttctcagtggttgtctaatcttttgggcactactgttgaaaaactcaggcctatctttgaatggattgaggcgaaacttagtgcaggagttgaatttctcaaggatgcttgggagattctcaaatttctcattacaggtgtttttgacatcgtcaagggtcaaatacaggttgcttcagataacatcaaggattgtgtaaaatgcttcattgatgttgttaacaaggcactcgaaatgtgcattgatcaagtcactatcgctggcgcaaagttgcgatcactcaacttaggtgaagtcttcatcgctcaaagcaagggactttaccgtcagtgtatacgtggcaaggagcagctgcaactactcatgcctcttaaggcaccaaaagaagtaacctttcttgaaggtgattcacatgacacagtacttacctctgaggaggttgttctcaagaacggtgaactcgaagcactcgagacgcccgttgatagcttcacaaatggagctatcgttggcacaccagtctgtgtaaatggcctcatgctcttagagattaaggacaaagaacaatactgcgcattgtctcctggtttactggctacaaacaatgtctttcgcttaaaagggggtgcaccaattaaaggtgtaacctttggagaagatactgtttgggaagttcaaggttacaagaatgtgagaatcacatttgagcttgatgaacgtgttgacaaagtgcttaatgaaaagtgctctgtctacactgttgaatccggtaccgaagttactgagtttgcatgtgttgtagcagaggctgttgtgaagactttacaaccagtttctgatctccttaccaacatgggtattgatcttgatgagtggagtgtagctacattctacttatttgatgatgctggtgaagaaaacttttcatcacgtatgtattgttccttttaccctccagatgaggaagaagaggacgatgcagagtgtgaggaagaagaaattgatgaaacctgtgaacatgagtacggtacagaggatgattatcaaggtctccctctggaatttggtgcctcagctgaaacagttcgagttgaggaagaagaagaggaagactggctggatgatactactgagcaatcagagattgagccagaaccagaacctacacctgaagaaccagttaatcagtttactggttatttaaaacttactgacaatgttgccattaaatgtgttgacaccgttaaggaggcacaaagtgctaatcctatggtgattgtaaatgctgctaacatacacctgaaacatggtggtggtgtagcaggtgcactcaacaaggcaaccaatggtgccatgcaaaaggagagtgatgattacattaagctaaatggccctcttacagtaggagggtcttgtttgctttctggacataatcttgctaagaagtgtctgcatgttgttggacctaacctaaatgcaggtgaggacatccagcttcttaaggcagcatatgaaaatttcaattcacaggacatcttacttgcaccattgttgtcagcaggcatatttggtgctaaaccacttcagtctttacaagtgtgcgtgcagacggttcgtacacaggtttatattgcagtcaatgacaaagctctttatgagcaggttgtcatggattatcttgataacctgaagcctagagtggaagcacctaaacaagaggagccaccaaacacagaagattccaaaactgaggagaaatctgtcgtacagaagcctgtcgatgtgaagccaaaaattaaggcctgcattgatgaggttaccacaacactggaagaaactaagtttcttaccaataagttactcttgtttgctgatatcaatggtaagctttaccatgattctcagaacatgcttagaggtgaagatatgtctttccttgaggaggatgcaccttacatggtaggtgatgttatcactagtggtgatatcacttgtgttgtaataccctccaaaaaggctggtggcactactgagatgctctcaagagctttgaagaaagtgccagttgatgagtatataaccacgtaccctggacaaggatgtgctggttatacacttgaggaagctaagactgctcttaagaaatgcaaatctgcattttatgtactaccttcagaagcacctaatgctaaggaagagattctaggaactgtatcctggaatttgagagaaatgcttgctcatgctgaagaggcaagaaaattaatgcctatatgcatggatgttagagccataatggcaaccatccaacgtaagtataaaggagttaaaattcaagagggcatcgttgactatggtgtccgattcttcttttatactagtaaagagcctgtagcttctattattacgaagctgaactctctaaatgagccgcttgtcacaatgccaattggttatgtgacacatggttttaatcttgaagaggctgcgcgctgtatgcgttctcttaaagctcctgccgtagtgtcagtatcatcaccagatgctgttactacatataatggatacctcacttcgtcatcaaagacatctgaggagcactttgtagaaacagtttctttggctggctcttacagagattggtcctattcaggacagcgtacagagttaggtgttgaatttcttaagcgtggtgacaaaattgtgtaccacaccctggagagccccgtcgagtttcatcttgacggtgaggttctttcacttgacaaactaaagagtctcttatccctgcgggaggttaagactataaaagtgttcacaactgtggacaacactaatctccacacacagcttgtggatatgtctatgacatatggacagcagtttggtccaacatacttggatggtgctgatgttacaaaaattaaacctcatgtaaatcatgagggtaagactttctttgtactacctagtgatgacacactacgtagtgaagctttcgagtactaccatactcttgatgagagttttcttggtaggtacatgtctgctttaaaccacacaaagaaatggaaatttcctcaagttggtggtttaacttcaattaaatgggctgataacaattgttatttgtctagtgttttattagcacttcaacagcttgaagtcaaattcaatgcaccagcacttcaagaggcttattatagagcccgtgctggtgatgctgctaacttttgtgcactcatactcgcttacagtaataaaactgttggcgagcttggtgatgtcagagaaactatgacccatcttctacagcatgctaatttggaatctgcaaagcgagttcttaatgtggtgtgtaaacattgtggtcagaaaactactaccttaacgggtgtagaagctgtgatgtatatgggtactctatcttatgataatcttaagacaggtgtttccattccatgtgtgtgtggtcgtgatgctacacaatatctagtacaacaagagtcttcttttgttatgatgtctgcaccacctgctgggtataaattacagcaaggtacattcttatgtgcgaatgagtacactggtaactatcagtgtggtcattacactcatataactgctaaggagaccctctatcgtattgacggagctcaccttacaaagatgtcagagtacaaaggaccagtgactgatgttttctacaaggaaacatcttacactacaaccatcaagcctgtgtcgtataaactcgatggagttacttacacagagattgaaccaaaattggatgggtattataaaaaggataatgcttatgtggaaaacacaagcattaccattaagaaacctaatgagctttcactagccttaggtttaaaaacaattgccactcatggtattgctgcaattaatagtgttccttggagtaaaattttggcttatgtcaaaccattcttaggacaagcagcaattacaacatcaaattgcgctaagagattagcacaacgtgtgtttaacaattatatgccttatgtgtttacattattgttccaattgtgtacttttactaaaagtaccaattctagaattagagcttcactacctacaactattgctaaaaatagtgttaagagtgttgctaaattatgtttggatgccggcattaattatgtgaagtcacccaaattttctaaattgttcacaatcgctatgtggctattgttgttaagtatttgcttaggttctctaatctgtgtaactgctgcttttggtgtactcttatctaattttggtgctccttcttattgtaatggcgttagagaattgtatcttaattcgtctaacgttactactatggatttctgtgaaggttcttttccttgcagcatttgtttaagtggattagactcccttgattcttatccagctcttgaaaccattcaggtgacgatttcatcgtacaagctagacttgacaattttaggtctggccgctgagtgggttttggcatatatgttgttcacaaaattcttttatttattaggtctttcagctataatgcaggcgttctttggctattttgctagtcatttcatcagcaattcttggctcatgtggtttatcattagtattgtacaaatggcacccgtttctgcaatggttaggatgtacatcttctttgcttctttctactacatatggaagagctatgttcatatcatggatggttgcacctcttcgacttgcatgatgtgctataagtgcaatcatgccacacgcgttgagtgtacaactattgttaatggcatgaagagatctttctatgtctatgcaaatggaggccgtggcttctgcaagactcacaattggaattgtctcaattgtgacacattttgcactggtagtacattcattagtgatgaagttgctcgtgatttgtcactccagtttaaaagaccaatcaaccctactgaccagtcatcgtatattgttgatagtgttgctgtgaaaaatggcgcgcttcacccctactttgacaaggctggtcaaaagacctatgagagacatccgctctcccattttgtcaatttagacaatttgagagctaacaacactaaaggttcactgcctattaatgtcatagtttttgatggcaagtccaaatgcgacgagtctgcttctaagtctgcttctgtgtactacagtcagctgatgtgccaacctattctgttgcttgaccaagctcttgtatcagacgttggagatagtactgaagtttccgttaagatgtttgatgcttatgtcgacaccttttcagcaacttttagtgttcctatggaaaaacttaaggcacttgttgctacagctcacagcgagttagcaaagggtgtagctttagatggtgtcctttctacattcgtgtcagctgcccgacaaggtgttgttgataccgatgttgacacaaaggatgttattgaatgtctcaaactttcacatcactctgacttagaagtgacaggtgacagttgttacaatttcatgctcacctataataaggttgaaaacatgacgcccagagatcttggcgcatgtattgactgtaatgcaaggcatatcaatgcccaagtagcaaaaagtcacaatgtttcactcatctggaatgtaaaagactacatgtctttatctgaacagctgcgtaaacaaattcgtagtgcagccaagaagaacaacataccttttagactaacttgtgctacaaccagacaggttgtcaatgtcataactactaaaatctcactcaagggtggtaagattgttagtacttgttttaaacttatgcttaaggccacattattgtgcgttcttgctgcattggtttgttatatcgttatgccagtacatacattgtcaatccatgatggttacacaaatgaaatcattggttacaaagccattcaggatggtgtcactcgtgacatcatttctactgatgattgttttgcaaataaacatgctggttttgacgcatggtttagccagcgtggtggttcatacaaaaatgacaaaagctgccctgtagtagctgctatcattacaagagagattggtttcatagtgcctggcttaccgggtactgtgctgagagcaatcaatggtgacttcttgcattttctacctcgtgtttttagtgctgttggcaacatttgctacacaccttccaaactcattgagtatagtgattttgctacctctgcttgcgttcttgccgctgagtgtacaatttttaaggatgctatgggcaaacctgtgccatattgttatgacactaatttgctagagggttctatttcttatagtgagcttcgtccagacactcgttatgtgcttatggatggctccatcatacagtttcctaacacttacctggagggttctgttagagtagtaacaacttttgatgctgagtactgtagacatggtacatgcgaaaggtcagaagtaggtatttgcctatctaccagtggtagatgggttcttaataatgagcattacagagctctatcaggagttttctgtggtgttgatgcgatgaatctcatagctaacatctttactcctcttgtgcaacctgtgggtgctttagatgcgtctgcttcagtagtggctggtggtattattgccatattggtgacttgtgctgcctactactttatgaaattcagacgtgcttttggtgagtacaaccatgttgttgctgctaatgcacttttgtttttgatgtctttcactatactctgtctggtaccagcttacagctttctgccgggagtctactcagtcttttacttgtacttgacattctatttcaccaatgatgtttcattcttggctcaccttcaatggtttgccatgttttctcctattgtgcctttttggataacagcaatctatgtattctgtatttctctgaagcactgccattggttctttaacaactatcttaggaaaagagtcatgtttaatggagttacatttagtaccttcgaggaggctgctttgtgtacctttttgctcaacaaggaaatgtacctaaaattgcgtagcgagacactgttgccacttacacagtataacaggtatcttgctctatataacaagtacaagtatttcagtggagtcttagatactaccagctatcgtgaagcagcttgctgccacttagcaaaggctctaaatgactttagcaactcaggtgctgatgttctctaccaaccaccacagacatcaatcacttctgctgttctgcagagtggttttaggaaaatggcattcccgtcaggcaaagttgaagggtgcatggtacaagtaacctgtggaactacaactcttaatggattgtggttggatgacacagtatactgtccaagacatgtcatttgcacagcagaagacatgcttaatcctaactatgaagatctgctcattcgcaaatccaaccatagctttcttgttcaggctggcaatgttcaacttcgtgttattggccattctatgcaaaattgtctgcttaggcttaaagttgatacttctaaccctaagacacccaagtataaatttgtccgtatccaacctggtcaaacattttcagttctagcatgctacaatggttcaccatctggtgtttatcagtgtgccatgagacctaatcataccattaaaggttctttccttaatggatcatgtggtagtgttggttttaacattgattatgattgcgtgtctttctgctatatgcatcatatggagcttccaacaggagtacacgctggtactgacttagaaggtaaattctatggtccatttgttgacagacaaactgcacaggctgcaggtacagacacaaccataacattaaatgttttggcatggctgtatgctgctgttatcaatggtgataggtggtttcttaatagattcaccactactttgaatgactttaaccttgtggcaatgaagtacaactatgaacctttgacacaagatcatgttgacatattgggacctctttctgctcaaacaggaattgccgtcttagatatgtgtgctgctttgaaagagctgctgcagaatggtatgaatggtcgtactatccttggtagcactattttagaagatgagtttacaccatttgatgttgttagacaatgctctggtgttaccttccaaggtaagttcaagaaaattgttaagggcactcatcattggatgcttttaactttcttgacatcactattgattcttgttcaaagtacacagtggtcactgtttttctttgtttacgagaatgctttcttgccatttactcttggtattatggcaattgctgcatgtgctatgctgcttgttaagcataagcacgcattcttgtgcttgtttctgttaccttctcttgcaacagttgcttactttaatatggtctacatgcctgctagctgggtgatgcgtatcatgacatggcttgaattggctgacactagcttgtctggttataggcttaaggattgtgttatgtatgcttcagctttagttttgcttattctcatgacagctcgcactgtttatgatgatgctgctagacgtgtttggacactgatgaatgtcattacacttgtttacaaagtctactatggtaatgctttagatcaagctatttccatgtgggccttagttatttctgcaacctctaactattctggtgtcgttacgactatcatgtttttagctagagctatagtgtttgtgtgtgttgagtattacccattgttatttattactggcaacaccttacagtgtatcatgcttgtttattgtttcttaggctattgttgctgctgctactttggccttttctgtttactcaaccgttacttcaggcttactcttggtgtttatgactacttggtctctacacaagaatttaggtatatgaactcccaggggcttttacctcctaagagtagtattgatgctttcaagcttaacattaagttgttgggtattggaggtaaaccatgtatcaaggttgctactgtacagtctaaaatgtctgacgtaaagtgcacatctgtggtactgctctcggttcttcaacaacttagagtagagtcatcttctaaattgtgggcacaatgtgtacaactccacaatgatattcttcttgcaaaagacacaactgaagctttcgagaagatggtttctcttttgtctgttttgctatccatgcagggtgctgtagacattaataggttgtgcgaggaagtgctcgataaccgtgctactcttcaggctattgcttcagaatttagttctttaccatcatatgccgcttatgccactgcccaggaggcctatgagcaggctgtagctaatggtgattctgaagtcgttctcaaaaagttaaagaaatctttgaatgtggctaaatctgagtttgaccgtgatgctgccatgcaacgcaagttggaaaagatggcagatcaggctatgacccaaatgtacaaacaggcaagatctgaggacaagagggcaaaagtaactagtgctatgcaaacaatgctcttcactatgcttaggaagcttgataatgatgcacttaacaacattatcaacaatgcgcgtgatggttgtgttccactcaacatcataccattgactacagcagccaaactcatggttgttgtccctgattatggtacctacaagaacacttgtgatggtaacacctttacatatgcatctgcactctgggaaatccagcaagttgttgatgcggatagcaagattgttcaacttagtgaaattaacatggacaattcaccaaatttggcttggcctcttattgttacagctctaagagccaactcagctgctaaactacagaataatgaactgagtccagtagcactacgacagatgtcctgtgcggctggtaccacacaaacagcttgtactgatgacaatgcacttgcctactataacaattcgaagggaggtaggtttgtgctggcattactatcagaccaccaagatctcaaatgggctagattccctaagagtgatggtacaggtacaatttacacagaactggaaccaccttgtaggtttgttacagacacaccaaaagggcctaaaatgaaatacttgtacttcatcaaaggcttaaacaacctaaatagaggtatggtgctgggcagtttagctgctacagtacgtcttcaggctggaaatgctacagaagtacctgccaattcaactgtgctttccttctgtgcttttgcagtagaccctgctaaagcatataaggattacctagcaagtggaggacaaccaatcaccaactgtgtgaagatgttgtgtacacacactggtacaggacaggcaattactgtaacaccagaagctaacatggaccaagggtcctttggtggtgcttcatgttgtctgtattgtagatgccacattgaccatccaaatcctaaaggattctgtgacttgaaaggtaagtacgtccaaatacctaccacttgtgctaatgacccagtgggttttacacttagaaacacagtctgtaccgtctgcggaatgtggaaaggttatggctgtagttgtgaccaactccgcgaacccttgatgcagtctgcggatgcatcaacgtttttaaacgggtttgcggtgtaagtgcagcccgtcttacaccgtgcggcacaggcactagtactgatgtcgtctacagggcttttgatatttacaacgaaaaagttgctggttttgcaaagttcctaaaaactaattgctgtcgcttccaggagaaggatgaggaaggcaatttattagactcttactttgtagttaagaggcatactatgtctaactaccaacatgaagagactatttataacttgattaaagattgtccagcggttgctgtccatgactttttcaagtttagagtagatggtgacatggtaccacatatatcacgtcagcgtctaactaaatacacaatggctgatttagtctatgctctacgtcattttgatgagggtaattgtgatacattaaaagaaatactcgtcacatacaattgctgtgatgatgattatttcaataagaaggattggtatgacttcgtagagaatcctgacatcttacgcgtatatgctaacttaggtgagcgtgtacgccaatcattattaaagactgtacaattctgcgatgctatgcgtgatgcaggcattgtaggcgtactgacattagataatcaggatcttaatgggaactggtacgatttcggtgatttcgtacaagtagcaccaggctgcggagttcctattgtggattcatattactcattgctgatgcccatcctcactttgactagggcattggctgctgagtcccatatggatgctgatctcgcaaaaccacttattaagtgggatttgctgaaatatgattttacggaagagagactttgtctcttcgaccgttattttaaatattgggaccagacataccatcccaattgtattaactgtttggatgataggtgtatccttcattgtgcaaactttaatgtgttattttctactgtgtttccacctacaagttttggaccactagtaagaaaaatatttgtagatggtgttccttttgttgtttcaactggataccattttcgtgagttaggagtcgtacataatcaggatgtaaacttacatagctcgcgtctcagtttcaaggaacttttagtgtatgctgctgatccagctatgcatgcagcttctggcaatttattgctagataaacgcactacatgcttttcagtagctgcactaacaaacaatgttgcttttcaaactgtcaaacccggtaattttaataaagacttttatgactttgctgtgtctaaaggtttctttaaggaaggaagttctgttgaactaaaacacttcttctttgctcaggatggcaacgctgctatcagtgattatgactattatcgttataatctgccracaatgtgtgatatcagacaactcctattcgtagttgaagttgttgataaatactttgattgttacgatggtggctgtattaatgccaaccaagtaatcgttaacaatctggataaatcagctggtttcccatttaataaatggggtaaggctagactttattatgactcaatgagttatgaggatcaagatgcacttttcgcgtatactaagcgtaatgtcatccctactataactcaaatgaatcttaagtatgccattagtgcaaagaatagagctcgcaccgtagctggtgtctctatctgtagtactatgacaaatagacagtttcatcagaaattattgaagtcaatagccgccactagaggagctactgtggtaattggaacaagcaagttttacggtggctggcataatatgttaaaaactgtttacagtgatgtagaaactccacaccttatgggttgggattatccaaaatgtgacagagccatgcctaacatgcttaggataatggcctctcttgttcttgctcgcaaacataacacttgctgtaacttatcacaccgtttctacaggttagctaacgagtgtgcgcaagtattaagtgagatggtcatgtgtggcggctcactatatgttaaaccaggtggaacatcatccggtgatgctacaactgcttatgctaatagtgtctttaacatttgtcaagctgttacagccaatgtaaatgcacttctttcaactgatggtaataagatagctgacaagtatgtccgcaatctacaacacaggctctatgagtgtctctatagaaatagggatgttgatcatgaattcgtggatgagttttacgcttacctgcgtaaacatttctccatgatgattctttctgatgatgccgttgtgtgctataacagtaactatgcggctcaaggtttagtagctagcattaagaactttaaggcagttctttattatcaaaataatgtgttcatgtctgaggcaaaatgttggactgagactgaccttactaaaggacctcacgaattttgctcacagcatacaatgctagttaaacaaggagatgattacgtgtacctgccttacccagatccatcaagaatattaggcgcaggctgttttgtcgatgatattgtcaaaacagatggtacacttatgattgaaaggttcgtgtcactggctattgatgcttacccacttacaaaacatcctaatcaggagtatgctgatgtctttcacttgtatttacaatacattagaaagttacatgatgagcttactggccacatgttggacatgtattccgtaatgctaactaatgataacacctcacggtactgggaacctgagttttatgaggctatgtacacaccacatacagtcttgcaggctgtaggtgcttgtgtattgtgcaattcacagacttcacttcgttgcggtgcctgtattaggagaccattcctatgttgcaagtgctgctatgaccatgtcatttcaacatcacacaaattagtgttgtctgttaatccctatgtttgcaatgccccaggttgtgatgtcactgatgtgacacaactgtatctaggaggtatgagctattattgcaagtcacataagcctcccattagttttccattatgtgctaatggtcaggtttttggtttatacaaaaacacatgtgtaggcagtgacaatgtcactgacttcaatgcgatagcaacatgtgattggactaatgctggcgattacatacttgccaacacttgtactgagagactcaagcttttcgcagcagaaacgctcaaagccactgaggaaacatttaagctgtcatatggtattgccactgtacgcgaagtactctctgacagagaattgcatctttcatgggaggttggaaaacctagaccaccattgaacagaaactatgtctttactggttaccgtgtaactaaaaatagtaaagtacagattggagagtacacctttgaaaaaggtgactatggtgatgctgttgtgtacagaggtactacgacatacaagttgaatgttggtgattactttgtgttgacatctcacactgtaatgccacttagtgcacctactctagtgccacaagagcactatgtgagaattactggcttgtacccaacactcaacatctcagatgagttttctagcaatgttgcaaattatcaaaaggtcggcatgcaaaagtactctacactccaaggaccacctggtactggtaagagtcattttgccatcggacttgctctctattacccatctgctcgcatagtgtatacggcatgctctcatgcagctgttgatgccctatgtgaaaaggcattaaaatatttgcccatagataaatgtagtagaatcatacctgcgcgtgcgcgcgtagagtgttttgataaattcaaagtgaattcaacactagaacagtatgttttctgcactgtaaatgcattgccagaaacaactgctgacattgtagtctttgatgaaatctctatggctactaattatgacttgagtgttgtcaatgctagacttcgtgcaaaacactacgtctatattggcgatcctgctcaattaccagccccccgcacattgctgactaaaggcacactagaaccagaatattttaattcagtgtgcagacttatgaaaacaataggtccagacatgttccttggaacttgtcgccgttgtcctgctgaaattgttgacactgtgagtgctttagtttatgacaataagctaaaagcacacaaggagaagtcagctcaatgcttcaaaatgttctacaaaggtgttattacacatgatgtttcatctgcaatcaacagacctcaaataggcgttgtaagagaatttcttacacgcaatcctgcttggagaaaagctgtttttatctcaccttataattcacagaacgctgtagcttcaaaaatcttaggattgcctacgcagactgttgattcatcacagggttctgaatatgactatgtcatattcacacaaactactgaaacagcacactcttgtaatgtcaaccgcttcaatgtggctatcacaagggcaaaaattggcattttgtgcataatgtctgatagggatctttatgacaaactgcaatttacaagtctagaaataccacgtcgcaatgtggctacattacaagcagaaaatgtaactggactttttaaggactgtagtaagatcattactggtcttcatcctacacaggcacctacacacctcagcgttgatataaagttcaagactgaaggattatgtgttgacataccaggcataccaaaggacatgacctaccgtagactcatctctatgatgggtttcaaaatgaattaccaagtcaatggttaccctaatatgtttatcacccgcgaagaagctattcgtcacgttcgtgcgtggattggctttgatgtagagggctgtcatgcaactagagatgctgtgggtactaacctacctctccagctaggattttctacaggtgttaacttagtagctgtaccgactggttatgttgacactgaaaataacacagaattcaccagagttaatgcaaaacctccaccaggtgaccagtttaaacatcttataccactcatgtataaaggcttgccctggaatgtagtgcgtattaagatagtacaaatgctcagtgatacactgaaaggattgtcagacagagtcgtgttcgtcctttgggcgcatggctttgagcttacatcaatgaagtactttgtcaagattggacctgaaagaacgtgttgtctgtgtgacaaacgtgcaacttgcttttctacttcatcagatacttatgcctgctggaatcattctgtgggttttgactatgtctataacccatttatgattgatgttcagcagtggggctttacgggtaaccttcagagtaaccatgaccaacattgccaggtacatggaaatgcacatgtggctagttgtgatgctatcatgactagatgtttagcagtccatgagtgctttgttaagcgcgttgattggtctgttgaataccctattataggagatgaactgagggttaattctgcttgcagaaaagtacaacacatggttgtgaagtctgcattgcttgctgataagtttccagttcttcatgacattggaaatccaaaggctatcaagtgtgtgcctcaggctgaagtagaatggaagttctacgatgctcagccatgtagtgacaaagcttacaaaatagaggaactcttctattcttatgctacacatcacgataaattcactgatggtgtttgtttgttttggaattgtaacgttgatcgttacccagccaatgcaattgtgtgtaggtttgacacaagagtcttgtcaaacttgaacttaccaggctgtgatggtggtagtttgtatgtgaataagcatgcattccacactccagctttcgataaaagtgcatttactaatttaaagcaattgcctttcttttactattctgatagtccttgtgagtctcatggcaaacaagtagtgtcggatattgattatgttccactcaaatctgctacgtgtattacacgatgcaatttaggtggtgctgtttgcagacaccatgcaaatgagtaccgacagtacttggatgcatataatatgatgatttctgctggatttagcctatggatttacaaacaatttgatacttataacctgtggaatacatttaccaggttacagagtttagaaaatgtggcttataatgttgttaataaaggacactttgatggacacgccggcgaagcacctgtttccatcattaataatgctgtttacacaaaggtagatggtattgatgtggagatctttgaaagtaagacaacacttcctgttaatgttgcatttgagctttgggctaagcgtaacattaaaccagtgccagagattaagatactcaataatttgggtgttgatatcgctgctaatactgtaatctgggactacaaaagagaagccccagcacatgtgtctacaataggtgtctgcacaatgactgacattgccaagaaacctactgagagtgcttgttcttcacttactgtcttgtttgatggtagagtggaaggacaggtagacctttttagaaacgcccgtaatggtgttttaataacagaaggttcagtcaaaggtctaacaccttcaaagggaccagcacaagctagcgtcaatggagtcacattaattggagaatcagtaaaaacacagtttaactactttaagaaagtagacggcattattcaacagttgcctgaaacctactttactcagagcagagacttagaggattttaagcccagatcacaaatggaaactgactttctcgagctcgctatggatgaattcatacagcgatataagctcgagggctatgccttcgaacacatcgtttatggagatttcagtcatggacaacttggcggtcttcatttaatgataggcttagccaagcgctcacaagattcaccacttaaattagaggattttatccctatggacagcacagtgaaaaattacttcataacagatgcgcaaacaggttcatcaaaatgtgtgcgttctgtgattgatcttttacttgatgactttgtcgagataataaagtcacaagatttgtcagtgatttcaaaagtggtcaaggttacaattgactatgctgaaatttcattcatgctttggtgtaaggatggacatgttgaaaccttctacccaaaactacaagcaagtcaagcgtggcaaccaggtgttgcgatgcctaacttgtacaagatgcaaagaatgcttcttgaaaagtgtgaccttcagaattatggtgaaaatgctgttataccaaaaggaataatgatgaatgtcgcaaagtatactcaactgtgtcaatacttaaatacacttactttagctgtaccctacaacatgagagttattcactttggtgctggctctgataaaggagttgcaccaggtacagctgtgctcagacaatggttgccaactggcacactacttgtcgattcagatcttaatgacttcgtctccgacgcagattctactttaattggagactgtgcaacagtacatacggctaataaatgggaccttattattagcgatatgtatgaccctaggaccaaacatgtgacaaaagagaatgactctaaagaagggtttttcacttatctgtgtggatttataaagcaaaaactagccctgggtggttctatagctgtaaagataacagagcattcttggaatgctgacctttacaagcttatgggccatttctcatggtggacagcttttgttacaaatgtaaatgcatcatcatcggaagcatttttaattggggctaactatcttggcaagccgaaggaacaaattgatggctataccatgcatgctaactacattttctggaggaacacaaatcctatccagttgtcttcctattcactctttgacatgagcaaatttcctcttaaattaagaggaactgctgtaatgtctcttaaggagaatcaaatcaatgatatgatttattctcttctggaaaaaggtaggcttatcattagagaaaacaacagagttgtggtttcaagtgatattcttgttaacaactaaacgaacatgtttattttcttattatttcttactctcactagtggtagtgaccttgaccggtgcaccacttttgatgatgttcaagctcctaattacactcaacatacttcatctatgaggggggtttactatcctgatgaaatttttagatcagacactctttatttaactcaggatttatttcttccattttattctaatgttacagggtttcatactattaatcatacgtttggcaaccctgtcataccttttaaggatggtatttattttgctgccacagagaaatcaaatgttgtccgtggttgggtttttggttctaccatgaacaacaagtcacagtcggtgattattattaacaattctactaatgttgttatacgagcatgtaactttgaattgtgtgacaaccctttctttgctgtttctaaacccatgggtacacagacacatactatgatattcgataatgcatttaattgcactttcgagtacatatctgatgccttttcgcttgatgtttcagaaaagtcaggtaattttaaacacttacgagagtttgtgtttaaaaataaagatgggtttctctaygtttataagggctatcaacctatagatgtagttcgtgatctaccttctggttttaacactttgaaacctatttttaagttgcctcttggtattaacattacaaattttagagccattcttacagccttttcacctgctcaagacatttggggcacgtcagctgcagcctattttgttggctatttaaagccaactacatttatgctcaagtatgatgaaaatggtacaatcacagatgctgttgattgttctcaaaatccacttgctgaactcaaatgctctgttaagagctttgagattgacaaaggaatttaccagacctctaatttcagggttgttccctcaggagatgttgtgagattccctaatattacaaacttgtgtccttttggagaggtttttaatgctactaaattcccttctgtctatgcatgggagagaaaaaaaatttctaattgtgttgctgattactctgtgctctacaactcaacatttttttcaacctttaagtgctatggcgtttctgccactaagttgaatgatctttgcttctccaatgtctatgcagattcttttgtagtcaagggagatgatgtaagacaaatagcgccaggacaaactggtgttattgctgattataattataaattgccagatgatttcatgggttgtgtccttgcttggaatactaggaacattgatgctacttcaactggtaattataattataaatataggtatcttagacatggcaagcttaggccctttgagagagacatatctaatgtgcctttctcccctgatggcaaaccttgcaccccacctgctcttaattgttattggccattaaatgattatggtttttacaccactactggcattggctaccaaccttacagagttgtagtactttcttttgaacttttaaatgcaccggccacggtttgtggaccaaaattatccactgaccttattaagaaccagtgtgtcaattttaattttaatggactcactggtactggtgtgttaactccttcttcaaagagatttcaaccatttcaacaatttggccgtgatgtttctgatttcactgattccgttcgagatcctaaaacatctgaaatattagacatttcaccttgcgcttttgggggtgtaagtgtaattacacctggaacaaatgcttcatctgaagttgctgttctatatcaagatgttaactgcactaatgtttctgcagcaattcatgcagatcaactcacaccagcttggcgcatatattctactggaaacaatgtattccagactcaagcaggctgtcttataggagctgagcatgtcgacacttcttatgagtgcgacattcctattggagctggcatttgtgctagttaccatacagtttctttattacgtagtactagccaaaaatctattgtggcttatactatgtctttaggtgctgatagttcaattgcttactctaataacaccattgctatacctactaacttttcaattagcattactacagaagtaatgcctgtttctatggctaaaacctccgtagattgtaatatgtacatctgcggagattctactgaatgtgctaatttgcttctccaatatggtagcttttgcacacaactaaatcgtgcactctcaggtattgctgctgaacaggatcgcaacacacgtgaagtgttcgctcaagtcaaacaaatgtacaaaaccccaactttgaaatattttggtggttttaatttttcacaaatattacctgaccctctaaagccaactaagaggtcttttattgaggacttgctctttaataaggtgacactcgctgatgctggcttcatgaagcaatatggcgaatgcctaggtgatattaatgctagagatctcatttgtgcgcagaagttcaatggacttacagtgttgccacctctgctcactgatgatatgattgctgcctacactgctgctctagttagtggtactgccactgctggatggacatttggtgctggcgctgctcttcaaataccttttgctatgcaaatggcatataggttcaatggcattggagttacccaaaatgttctctatgagaaccaaaaacaaatcgccaaccaatttaacaaggcgattagtcaaattcaagaatcacttacaacaacatcaactgcattgggcaagctgcaagacgttgttaaccagaatgctcaagcattaaacacacttgttaaacaacttagctctaattttggtgcaatttcaagtgtgctaaatgatatcctttcgcgacttgataaagtcgaggcggaggtacaaattgacaggttaattacaggcagacttcaaagccttcaaacctatgtaacacaacaactaatcagggctgctgaaatcagggcttctgctaatcttgctgctactaaaatgtctgagtgtgttcttggacaatcaaaaagagttgacttttgtggaaagggctaccaccttatgtccttcccacaagcagccccgcatggtgttgtcttcctacatgtcacgtatgtgccatcccaggagaggaacttcaccacagcgccagcaatttgtcatgaaggcaaagcatacttccctcgtgaaggtgtttttgtgtttaatggcacttcttggtttattacacagaggaacttcttttctccacaaataattactacagacaatacatttgtctcaggaaattgtgatgtcgttattggcatcattaacaacacagtttatgatcctctgcaacctgagcttgactcattcaaaggagagctggacaagtacttcaaaaatcatacatcaccagatgttgatcttggcgacatttcaggcattaacgcttctgtcgtcaacattcaaaaagaaattgaccgcctcaatgaggtcgctaaaaatttaaatgaatcactcattgaccttcaagaattgggaaaatatgagcaatatattaaatggccttggtatgtttggctcggcttcattgctggactaattgccatcgtcatggttacaatcttgctttgttgcatgactagttgttgcagttgcctcaagggtgcatgctcttgtggttcttgctgcaagtttgatgaggatgactctgagccagttctcaagggtgtcaaattacattacacataaacgaacttatggatttgtttatgagattttttactcttggatcaattactgcacagccagtaaaaattgacaatgcttctcctgcaagtactgctcatgctacagcaacgataccgctacaagcctcactccctttcggatggcttgttattggcgttgcatttcttgctgtttttcagagcgctaccaaaataattgcgctcaataaaagatggcagctagccctttataagggcttccagttcatttgcaatttactgctgctatttgttaccatctattcacatcttttgcttgtcgctgcaggtatggaggcgcaatttttgtacctctatgccttgatatattttctacaatgcatcaacgcatgtagaattattatgagatgttggctttgttggaagtgcaaatccaagaacccattactttatgatgccaactactttgtttgctggcacacacataactatgactactgtataccatataacagtgtcacagatacaattgtcgttactgaaggtgacggcatttcaacaccaaaactcaaagaagactaccaaattggtggttattctgaggataggcactcaggtgttaaagactatgtcgttgtacatggctatttcaccgaagtttactaccagcttgagtctacacaaattactacaaacactggtattgaaaatgctacattcttcatctttaacaagcttgttaaagacccaccgaatgtgcaaatacacacaatcgacggctcttcaggagttgctaatccagcaatggatccaatttatgatgagccgacgacgactactagcgtgcctttgtaagcacaagaaagtgagtacgaacttatgtactcattcgtttcggaagaaacaggtacgttaatagttaatagcgtacttctttttcttgctttcgtggtattcttgctagtcacactagccatccttactgcgcttcgattgtgtgcgtactgctgcaatattgttaacgtgagtttagtaaaaccaacggtttacgtctactcgcgtgttaaaaatctgaactcttctgaaggagttcctgatcttctggtctaaacgaactaactattattattattctgtttggaactttaacattgcttatcatggcagacaacggtactattaccgttgaggagcttaaacaactcctggaacaatggaacctagtaataggtttcctattcctagcctggattatgttactacaatttgcctattctaatcggaacaggtttttgtacataataaagcttgttttcctctggctcttgtggccagtaacacttgcttgttttgtgcttgctgctgtctacagaattaattgggtgactggcgggattgcgattgcaatggcttgtattgtaggcttgatgtggcttagctacttcgttgcttccttcaggctgtttgctcgtacccgctcaatgtggtcattcaacccggaaacaaacattcttcccaatgtgcctctccgggggacaattgtgaccagaccgctcatggaaagtgaacttgtcattggtgctgtgatcattcgtggtcacttgcgaatggccggacactccctagggcgctgtgacattaaggacctgccaaaagagatcactgtggctacatcacgaacgctttcttattacaaattaggagcgtcgcagcgtgtaggcactgattcaggttttgctgcatacaaccgctaccgtattggaaactataaattaaatacagaccacgccggtagcaacgacaatattgctttgctagtacagtaagtgacaacagatgtttcatcttgttgacttccaggttacaatagcagagatattgattatcattatgaggactttcaggattgctatttggaatcttgacgttataataagttcaatagtgagacaattatttaagcctctaactaagaagaattattcggagttagatgatgaagaacctatggagttagattatccataaaacgaacatgaaaattattctcttcctgacattgattgtatttacatcttgcgagctatatcactatcaggagtgtgttagaggtacgactgtactactaaaagaaccttgcccatcaggaacatacgagggcaattcaccatttcaccctcttgctgacaataaatttgcactaacttgcactagcacacactttgcttttgcttgtgctgacggtactcgacatacctatcagctgcgtgcaagatcagtttcaccaaaacttttcatcagacaagaggaggttcaacaagagctctactcgccactttttctcattgttgctgctctagtatttttaatactttgcttcaccattaagagaaagacagaatgaatgagctcactttaattgacttctatttgtgctttttagcctttctgctattccttgttttaataatgcttattatattttggttttcactcgaaatccaggatctagaagaaccttgtaccaaagtctaaacgaacatgaaacttctcattgttttgacttgtatttctctatgcagttgcatatgcactgtagtacagcgctgtgcatctaataaacctcatgtgcttgaagatccttgtaaggtacaacactaggggtaatacttatagcactgcttggctttgtgctctaggaaaggttttaccttttcatagatggcacactatggttcaaacatgcacacctaatgttactatcaactgtcaagatccagctggtggtgcgcttatagctaggtgttggtaccttcatgaaggtcaccaaactgctgcatttagagacgtacttgttgttttaaataaacgaacaaattaaaatgtctgataatggaccccaatcaaaccaacgtagtgccccccgcattacatttggtggacccacagattcaactgacaataaccagaatggaggacgcaatggggcaaggccaaaacagcgccgaccccaaggtttacccaataatactgcgtcttggttcacagctctcactcagcatggcaaggaggaacttagattccctcgaggccagggcgttccaatcaacaccaatagtggtccagatgaccaaattggctactaccgaagagctacccgacgagttcgtggtggtgacggcaaaatgaaagagctcagccccagatggtacttctattacctaggaactggcccagaagcttcacttccctacggcgctaacaaagaaggcatcgtatgggttgcaactgagggagccttgaatacacccaaagaccacattggcacccgcaatcctaataacaatgctgccaccgtgctacaacttcctcaaggaacaacattgccaaaaggcttctacgcagagggaagcagaggcggcagtcaagcctcttctcgctcctcatcacgtagtcgcggtaattcaagaaattcaactcctggcagcagtaggggaaattctcctgctcgaatggctagcggaggtggtgaaactgccctcgcgctattgctgctagacagattgaaccagcttgagagcaaagtttctggtaaaggccaacaacaacaaggccaaactgtcactaagaaatctgctgctgaggcatctaaaaagcctcgccaaaaacgtactgccacaaaacagtacaacgtcactcaagcatttgggagacgtggtccagaacaaacccaaggaaatttcggggaccaagacctaatcagacaaggaactgattacaaacattggccgcaaattgcacaatttgctccaagtgcctctgcattctttggaatgtcacgcattggcatggaagtcacaccttcgggaacatggctgacttatcatggagccattaaattggatgacaaagatccacaattcaaagacaacgtcatactgctgaacaagcacattgacgcatacaaaacattcccaccaacagagcctaaaaaggacaaaaagaaaaagactgatgaagctcagcctttgccgcagagacaaaagaagcagcccactgtgactcttcttcctgcggctgacatggatgatttctccagacaacttcaaaattccatgagtggagcttctgctgattcaactcaggcataaacactcatgatgaccacacaaggcagatgggctatgtaaacgttttcgcaattccgtttacgatacatagtctactcttgtgcagaatgaattctcgtaactaaacagcacaagtaggtttagttaactttaatctcacatagcaatctttaatcaatgtgtaacattagggaggacttgaaagagccaccacattttcatcgaggccacgcggagtacgatcgagggtacagtgaataatgctagggagagctgcctatatggaagagccctaatgtgtaaa

SEQ ID NO: 29820 - DNA, 29592 bp, SARS Coronavirus
tctgtgtagctgtcgctcggctgcatgcctagtgcacctacgcagtataaacaataataaattttactgtcgttgacaagaaacgagtaactcgtccctcttctgcagactgcttacggtttcgtccgtgttgcagtcgatcatcagcatacctaggtttcgtccgggtgtgaccgaaaggtaagatggagagccttgttcttggtgtcaacgagaaaacacacgtccaactcagtttgcctgtccttcaggttagagacgtgctagtgcgtggcttcggggactctgtggaagaggccctatcggaggcacgtgaacacctcaaaaatggcacttgtggtctagtagagctggaaaaaggcgtactgccccagcttgaacagccctatgtgttcattaaacgttctgatgccttaagcaccaatcacggccacaaggtcgttgagctggttgcagaaatggacggcattcagtacggtcgtagcggtataacactgggagtactcgtgccacatgtgggcgaaaccccaattgcataccgcaatgttcttcttcgtaagaacggtaataagggagccggtggtcatagctatggcatcgatctaaagtcttatgacttaggtgacgagcttggcactgatcccattgaagattatgaacaaaactggaacactaagcatggcagtggtgcactccgtgaactcactcgtgagctcaatggaggtgcagtcactcgctatgtcgacaacaatttctgtggcccagatgggtaccctcttgattgcatcaaagattttctcgcacgcgcgggcaagtcaatgtgcactctttccgaacaacttgattacatcgagtcgaagagaggtgtctactgctgccgtgaccatgaacatgaaattgcctggttcactgagcgctctgataagagctacgagcaccagacacccttcgaaattaagagtgccaagaaatttgacactttcaaaggggaatgcccaaagtttgtgtttcctcttaactcaaaagtcaaagtcattcaaccacgtgttgaaaagaaaaagactgagggtttcatggggcgtatacgctctgtgtaccctgttgcatctccacaggagtgtaacaatatgcacttgtctaccttgatgaaatgtaatcattgcgatgaagtttcatggcagacgtgcgactttctgaaagccacttgtgaacattgtggcactgaaaatttagttattgaaggacctactacatgtgggtacctacctactaatgctgtagtgaaaatgccatgtcctgcctgtcaagacccagagattggacctgagcatagtgttgcagattatcacaaccactcaaacattgaaactcgactccgcaagggaggtaggactagatgttttggaggctgtgtgtttgcctatgttggctgctataataagcgtgcctactgggttcctcgtgctagtgctgatattggctcaggccatactggcattactggtgacaatgtggagaccttgaatgaggatctccttgagatactgagtcgtgaacgtgttaacattaacattgttggcgattttcatttgaatgaagaggttgccatcattttggcatctttctctgcttctacaagtgcctttattgacactataaagagtcttgattacaagtctttcmaaaccattgttgagtcctgcggtaactataaagttaccaagggaaagcccgtaaaaggtgcttggaacattggacaacagagatcagttttaacaccactgtgtggttttccctcacaggctgctggtgttatcagatcaatttttgcgcgcacacttgatgcagcaaaccactcaattcctgatttgcaaagagcagctgtcaccatacttgatggtatttctgaacagtcattacgtcttgtcgacgccatggtttatacttcagacctgctcaccaacagtgtcattattatggcatatgtaactggtggtcttgtacaacagacttctcagtggttgtctaatcttttgggcactactgttgaaaaactcaggcctatctttgaatggattgaggcgaaacttagtgcaggagttgaatttctcaaggatgcttgggagattctcaaatttctcattacaggtgtttttgacatcgtcaagggtcaaatacaggttgcttcagataacatcaaggattgtgtaaaatgcttcattgatgttgttaacaaggcactcgaaatgtgcattgatcaagtcactatcgctggcgcaaagttgcgatcactcaacttaggtgaagtcttcatcgctcaaagcaagggactttaccgtcagtgtatacgtggcaaggagcagctgcaactactcatgcctcttaaggcaccaaaagaagtaacctttcttgaaggtgattcacatgacacagtacttacctctgaggaggttgttctcaagaacggtgaactcgaagcactcgagacgcccgttgatagcttcacaaatggagctatcgttggcacaccagtctgtgtaaatggcctcatgctcttagagattaaggacaaagaacaatactgcgcattgtctcctggtttactggctacaaacaatgtctttcgcttaaaagggggtgcaccaattaaaggtgtaacctttggagaagatactgtttgggaagttcaaggttacaagaatgtgagaatcacatttgagcttgatgaacgtgttgacaaagtgcttaatgaaaagtgctctgtctacactgttgaatccggtaccgaagttactgagtttgcatgtgttgtagcagaggctgttgtgaagactttacaaccagtttctgatctccttaccaacatgggtattgatcttgatgagtggagtgtagctacattctacttatttgatgatgctggtgaagaaaacttttcatcacgtatgtattgttccttttaccctccagatgaggaagaagaggacgatgcagagtgtgaggaagaagaaattgatgaaacctgtgaacatgagtacggtacagaggatgattatcaaggtctccctctggaatttggtgcctcagctgaaacagttcgagttgaggaagaagaagaggaagactggctggatgatactactgagcaatcagagattgagccagaaccagaacctacacctgaagaaccagttaatcagtttactggttatttaaaacttactgacaatgttgccattaaatgtgttgacaccgttaaggaggcacaaagtgctaatcctatggtgattgtaaatgctgctaacatacacctgaaacatggtggtggtgtagcaggtgcactcaacaaggcaaccaatggtgccatgcaaaaggagagtgatgattacattaagctaaatggccctcttacagtaggagggtcttgtttgctttctggacataatcttgctaagaagtgtctgcatgttgttggacctaacctaaatgcaggtgaggacatccagcttcttaaggcagcatatgaaaatttcaattcacaggacatcttacttgcaccattgttgtcagcaggcatatttggtgctaaaccacttcagtctttacaagtgtgcgtgcagacggttcgtacacaggtttatattgcagtcaatgacaaagctctttatgagcaggttgtcatggattatcttgataacctgaagcctagagtggaagcacctaaacaagaggagccaccaaacacagaagattccaaaactgaggagaaatctgtcgtacagaagcctgtcgatgtgaagccaaaaattaaggcctgcattgatgaggttaccacaacactggaagaaactaagtttcttaccaataagttactcttgtttgctgatatcaatggtaagctttaccatgattctcagaacatgcttagaggtgaagatatgtctttccttgaggaggatgcaccttacatggtaggtgatgttatcactagtggtgatatcacttgtgttgtaataccctccaaaaaggctggtggcactactgagatgctctcaagagctttgaagaaagtgccagttgatgagtatataaccacgtaccctggacaaggatgtgctggttatacacttgaggaagctaagactgctcttaagaaatgcaaatctgcattttatgtactaccttcagaagcacctaatgctaaggaagagattctaggaactgtatcctggaatttgagagaaatgcttgctcatgctgaagaggcaagaaaattaatgcctatatgcatggatgttagagccataatggcaaccatccaacgtaagtataaaggagttaaaattcaagagggcatcgttgactatggtgtccgattcttcttttatactagtaaagagcctgtagcttctattattacgaagctgaactctctaaatgagccgcttgtcacaatgccaattggttatgtgacacatggttttaatcttgaagaggctgcgcgctgtatgcgttctcttaaagctcctgccgtagtgtcagtatcatcaccagatgctgttactacatataatggatacctcacttcgtcatcaaagacatctgaggagcactttgtagaaacagtttctttggctggctcttacagagattggtcctattcaggacagcgtacagagttaggtgttgaatttcttaagcgtggtgacaaaattgtgtaccacaccctggagagccccgtcgagtttcatcttgacggtgaggttctttcacttgacaaactaaagagtctcttatccctgcgggaggttaagactataaaagtgttcacaactgtggacaacactaatctccacacacagcttgtggatatgtctatgacatatggacagcagtttggtccaacatacttggatggtgctgatgttacaaaaattaaacctcatgtaaatcatgagggtaagactttctttgtactacctagtgatgacacactacgtagtgaagctttcgagtactaccatactcttgatgagagttttcttggtaggtacatgtctgctttaaaccacacaaagaaatggaaatttcctcaagttggtggtttaacttcaattaaatgggctgataacaattgttatttgtctagtgttttattagcacttcaacagcttgaagtcaaattcaatgcaccagcacttcaagaggcttattatagagcccgtgctggtgatgctgctaacttttgtgcactcatactcgcttacagtaataaaactgttggcgagcttggtgatgtcagagaaactatgacccatcttctacagcatgctaatttggaatctgcaaagcgagttcttaatgtggtgtgtaaacattgtggtcagaaaactactaccttaacgggtgtagaagctgtgatgtatatgggtactctatcttatgataatcttaagacaggtgtttccattccatgtgtgtgtggtcgtgatgctacacaatatctagtacaacaagagtcttcttttgttatgatgtctgcaccacctgctgggtataaattacagcaaggtacattcttatgtgcgaatgagtacactggtaactatcagtgtggtcattacactcatataactgctaaggagaccctctatcgtattgacggagctcaccttacaaagatgtcagagtacaaaggaccagtgactgatgttttctacaaggaaacatcttacactacaaccatcaagcctgtgtcgtataaactcgatggagttacttacacagagattgaaccaaaattggatgggtattataaaaaggataatgcttactatacagagcagcctatagaccttgtaccaactcaaccattaccaaatgcgagttttgataatttcaaactcacatgttctaacacaaaatttgctgatgatttaaatcaaatgacaggcttcacaaagccagcttcacgagagctatctgtcacattcttcccagacttgaatggcgatgtagtggctattgactatagacactattcagcgagtttcaagaaaggtgctaaattactgcataagccaattgtttggcacattaaccaggctacaaccaagacaacgttcaaaccaaacacttggtgtttacgttgtctttggagtacaaagccagtagatacttcaaattcatttgaagttctggcagtagaagacacacaaggaatggacaatcttgcttgtgaaagtcaacaacccacctctgaagaagtagtggaaaatcctaccatacagaaggaagtcatagagtgtgacgtgaaaactaccgaagttgtaggcaatgtcatacttaaaccatcagatgaaggtgttaaagtaacacaagagttaggtcatgaggatcttatggctgcttatgtggaaaacacaagcattaccattaagaaacctaatgagctttcactagccttaggtttaaaaacaattgccactcatggtattgctgcaattaatagtgttccttggagtaaaattttggcttatgtcaaaccattcttaggacaagcagcaattacaacatcaaattgcgctaagagattagcacaacgtgtgtttaacaattatatgccttatgtgtttacattattgttccaattgtgtacttttactaaaagtaccaattctagaattagagcttcactacctacaactattgctaaaaatagtgttaagagtgttgctaaattatgtttggatgccggcattaattatgtgaagtcacccaaattttctaaattgttcacaatcgctatgtggctattgttgttaagtatttgcttaggttctctaatctgtgtaactgctgcttttggtgtactcttatctaattttggtgctccttcttattgtaatggcgttagagaattgtatcttaattcgtctaacgttactactatggatttctgtgaaggttcttttccttgcagcatttgtttaagtggattagactcccttgattcttatccagctcttgaaaccattcaggtgacgatttcatcgtacaagctagacttgacaattttaggtctggccgctgagtgggttttggcatatatgttgttcacaaaattcttttatttattaggtctttcagctataatgcaggcgttctttggctattttgctagtcatttcatcagcaattcttggctcatgtggtttatcattagtattgtacaaatggcacccgtttctgcaatggttaggatgtacatcttctttgcttctttctactacatatggaagagctatgttcatatcatggatggttgcacctcttcgacttgcatgatgtgctataagtgcaatcatgccacacgcgttgagtgtacaactattgttaatggcatgaagagatctttctatgtctatgcaaatggaggccgtggcttctgcaagactcacaattggaattgtctcaattgtgacacattttgcactggtagtacattcattagtgatgaagttgctcgtgatttgtcactccagtttaaaagaccaatcaaccctactgaccagtcatcgtatattgttgatagtgttgctgtgaaaaatggcgcgcttcacccctactttgacaaggctggtcaaaagacctatgagagacatccgctctcccattttgtcaatttagacaatttgagagctaacaacactaaaggttcactgcctattaatgtcatagtttttgatggcaagtccaaatgcgacgagtctgcttctaagtctgcttctgtgtactacagtcagctgatgtgccaacctattctgttgcttgaccaagctcttgtatcagacgttggagatagtactgaagtttccgttaagatgtttgatgcttatgtcgacaccttttcagcaacttttagtgttcctatggaaaaacttaaggcacttgttgctacagctcacagcgagttagcaaagggtgtagctttagatggtgtcctttctacattcgtgtcagctgcccgacaaggtgttgttgataccgatgttgacacaaaggatgttattgaatgtctcaaactttcacatcactctgacttagaagtgacaggtgacagttgttacaatttcatgctcacctataataaggttgaaaacatgacgcccagagatcttggcgcatgtattgactgtaatgcaaggcatatcaatgcccaagtagcaaaaagtcacaatgtttcactcatctggaatgtaaaagactacatgtctttatctgaacagctgcgtaaacaaattcgtagtgcagccaagaagaacaacataccttttagactaacttgtgctacaaccagacaggttgtcaatgtcataactactaaaatctcactcaagggtggtaagattgttagtacttgttttaaacttatgcttaaggccacattattgtgcgttcttgctgcattggtttgttatatcgttatgccagtacatacattgtcaatccatgatggttacacaaatgaaatcattggttacaaagccattcaggatggtgtcactcgtgacatcatttctactgatgattgttttgcaaataaacatgctggttttgacgcatggtttagccagcgtggtggttcatacaaaaatgacaaaagctgccctgtagtagctgctatcattacaagagagattggtttcatagtgcctggcttaccgggtactgtgctgagagcaatcaatggtgacttcttgcattttctacctcgtgtttttagtgctgttggcaacatttgctacacaccttccaaactcattgagtatagtgattttgctacctctgcttgcgttcttgccgctgagtgtacaatttttaaggatgctatgggcaaacctgtgccatattgttatgacactaatttgctagagggttctatttcttatagtgagcttcgtccagacactcgttatgtgcttatggatggctccatcatacagtttcctaacacttacctggagggttctgttagagtagtaacaacttttgatgctgagtactgtagacatggtacatgcgaaaggtcagaagtaggtatttgcctatctaccagtggtagatgggttcttaataatgagcattacagagctctatcaggagttttctgtggtgttgatgcgatgaatctcatagctaacatctttactcctcttgtgcaacctgtgggtgctttagatgcgtctgcttcagtagtggctggtggtattattgccatattggtgacttgtgctgcctactactttatgaaattcagacgtgcttttggtgagtacaaccatgttgttgctgctaatgcacttttgtttttgatgtctttcactatactctgtctggtaccagcttacagctttctgccgggagtctactcagtcttttacttgtacttgacattctatttcaccaatgatgtttcattcttggctcaccttcaatggtttgccatgttttctcctattgtgcctttttggataacagcaatctatgtattctgtatttctctgaagcactgccattggttctttaacaactatcttaggaaaagagtcatgtttaatggagttacatttagtaccttcgaggaggctgctttgtgtacctttttgctcaacaaggaaatgtacctaaaattgcgtagcgagacactgttgccacttacacagtataacaggtatcttgctctatataacaagtacaagtatttcagtggagtcttagatactaccagctatcgtgaagcagcttgctgccacttagcaaaggctctaaatgactttagcaactcaggtgctgatgttctctaccaaccaccacagacatcaatcacttctgctgttctgcagagtggttttaggaaaatggcattcccgtcaggcaaagttgaagggtgcatggtacaagtaacctgtggaactacaactcttaatggattgtggttggatgacacagtatactgtccaagacatgtcatttgcacagcagaagacatgcttaatcctaactatgaagatctgctcattcgcaaatccaaccatagctttcttgttcaggctggcaatgttcaacttcgtgttattggccattctatgcaaaattgtctgcttaggcttaaagttgatacttctaaccctaagacacccaagtataaatttgtccgtatccaacctggtcaaacattttcagttctagcatgctacaatggttcaccatctggtgtttatcagtgtgccatgagacctaatcataccattaaaggttctttccttaatggatcatgtggtagtgttggttttaacattgattatgattgcgtgtctttctgctatatgcatcatatggagcttccaacaggagtacacgctggtactgacttagaaggtaaattctatggtccatttgttgacagacaaactgcacaggctgcaggtacagacacaaccataacattaaatgttttggcatggctgtatgctgctgttatcaatggtgataggtggtttcttaatagattcaccactactttgaatgactttaaccttgtggcaatgaagtacaactatgaacctttgacacaagatcatgttgacatattgggacctctttctgctcaaacaggaattgccgtcttagatatgtgtgctgctttgaaagagctgctgcagaatggtatgaatggtcgtactatccttggtagcactattttagaagatgagtttacaccatttgatgttgttagacaatgctctggtgttaccttccaaggtaagttcaagaaaattgttaagggcactcatcattggatgcttttaactttcttgacatcactattgattcttgttcaaagtacacagtggtcactgtttttctttgtttacgagaatgctttcttgccatttactcttggtattatggcaattgctgcatgtgctatgctgcttgttaagcataagcacgcattcttgtgcttgtttctgttaccttctcttgcaacagttgcttactttaatatggtctacatgcctgctagctgggtgatgcgtatcatgacatggcttgaattggctgacactagcttgtctggttataggcttaaggattgtgttatgtatgcttcagctttagttttgcttattctcatgacagctcgcactgtttatgatgatgctgctagacgtgtttggacactgatgaatgtcattacacttgtttacaaagtctactatggtaatgctttagatcaagctatttccatgtgggccttagttatttctgcaacctctaactattctggtgtcgttacgactatcatgtttttagctagagctatagtgtttgtgtgtgttgagtattacccattgttatttattactggcaacaccttacagtgtatcatgcttgtttattgtttcttaggctattgttgctgctgctactttggccttttctgtttactcaaccgttacttcaggcttactcttggtgtttatgactacttggtctctacacaagaatttaggtatatgaactcccaggggcttttacctcctaagagtagtattgatgctttcaagcttaacattaagttgttgggtattggaggtaaaccatgtatcaaggttgctactgtacagtctaaaatgtctgacgtaaagtgcacatctgtggtactgctctcggttcttcaacaacttagagtagagtcatcttctaaattgtgggcacaatgtgtacaactccacaatgatattcttcttgcaaaagacacaactgaagctttcgagaagatggtttctcttttgtctgttttgctatccatgcagggtgctgtagacattaataggttgtgcgaggaagtgctcgataaccgtgctactcttcaggctattgcttcagaatttagttctttaccatcatatgccgcttatgccactgcccaggaggcctatgagcaggctgtagctaatggtgattctgaagtcgttctcaaaaagttaaagaaatctttgaatgtggctaaatctgagtttgaccgtgatgctgccatgcaacgcaagttggaaaagatggcagatcaggctatgacccaaatgtacaaacaggcaagatctgaggacaagagggcaaaagtaactagtgctatgcaaacaatgctcttcactatgcttaggaagcttgataatgatgcacttaacaacattatcaacaatgcgcgtgatggttgtgttccactcaacatcataccattgactacagcagccaaactcatggttgttgtccctgattatggtacctacaagaacacttgtgatggtaacacctttacatatgcatctgcactctgggaaatccagcaagttgttgatgcggatagcaagattgttcaacttagtgaaattaacatggacaattcaccaaatttggcttggcctcttattgttacagctctaagagccaactcagctgctaaactacagaataatgaactgagtccagtagcactacgacagatgtcctgtgcggctggtaccacacaaacagcttgtactgatgacaatgcacttgcctactataacaattcgaagggaggtaggtttgtgctggcattactatcagaccaccaagatctcaaatgggctagattccctaagagtgatggtacaggtacaatttacacagaactggaaccaccttgtaggtttgttacagacacaccaaaagggcctaaaatgaaatacttgtacttcatcaaaggcttaaacaacctaaatagaggtatggtgctgggcagtttagctgctacagtacgtcttcaggctggaaatgctacagaagtacctgccaattcaactgtgctttccttctgtgcttttgcagtagaccctgctaaagcatataaggattacctagcaagtggaggacaaccaatcaccaactgtgtgaagatgttgtgtacacacactggtacaggacaggcaattactgtaacaccagaagctaacatggaccaagggtcctttggtggtgcttcatgttgtctgtattgtagatgccacattgaccatccaaatcctaaaggattctgtgacttgaaaggtaagtacgtccaaatacctaccacttgtgctaatgacccagtgggttttacacttagaaacacagtctgtaccgtctgcggaatgtggaaaggttatggctgtagttgtgaccaactccgcgaacccttgatgcagtctgcggatgcatcaacgtttttaaacgggtttgcggtgtaagtgcagcccgtcttacaccgtgcggcacaggcactagtactgatgtcgtctacagggcttttgatatttacaacgaaaaagttgctggttttgcaaagttcctaaaaactaattgctgtcgcttccaggagaaggatgaggaaggcaatttattagactcttactttgtagttaagaggcatactatgtctaactaccaacatgaagagactatttataacttgattaaagattgtccagcggttgctgtccatgactttttcaagtttagagtagatggtgacatggtaccacatatatcacgtcagcgtctaactaaatacacaatggctgatttagtctatgctctacgtcattttgatgagggtaattgtgatacattaaaagaaatactcgtcacatacaattgctgtgatgatgattatttcaataagaaggattggtatgacttcgtagagaatcctgacatcttacgcgtatatgctaacttaggtgagcgtgtacgccaatcattattaaagactgtacaattctgcgatgctatgcgtgatgcaggcattgtaggcgtactgacattagataatcaggatcttaatgggaactggtacgatttcggtgatttcgtacaagtagcaccaggctgcggagttcctattgtggattcatattactcattgctgatgcccatcctcactttgactagggcattggctgctgagtcccatatggatgctgatctcgcaaaaccacttattaagtgggatttgctgaaatatgattttacggaagagagactttgtctcttcgaccgttattttaaatattgggaccagacataccatcccaattgtattaactgtttggatgataggtgtatccttcattgtgcaaactttaatgtgttattttctactgtgtttccacctacaagttttggaccactagtaagaaaaatatttgtagatggtgttccttttgttgtttcaactggataccattttcgtgagttaggagtcgtacataatcaggatgtaaacttacatagctcgcgtctcagtttcaaggaacttttagtgtatgctgctgatccagctatgcatgcagcttctggcaatttattgctagataaacgcactacatgcttttcagtagctgcactaacaaacaatgttgcttttcaaactgtcaaacccggtaattttaataaagacttttatgactttgctgtgtctaaaggtttctttaaggaaggaagttctgttgaactaaaacacttcttctttgctcaggatggcaacgctgctatcagtgattatgactattatcgttataatctgccracaatgtgtgatatcagacaactcctattcgtagttgaagttgttgataaatactttgattgttacgatggtggctgtattaatgccaaccaagtaatcgttaacaatctggataaatcagctggtttcccatttaataaatggggtaaggctagactttattatgactcaatgagttatgaggatcaagatgcacttttcgcgtatactaagcgtaatgtcatccctactataactcaaatgaatcttaagtatgccattagtgcaaagaatagagctcgcaccgtagctggtgtctctatctgtagtactatgacaaatagacagtttcatcagaaattattgaagtcaatagccgccactagaggagctactgtggtaattggaacaagcaagttttacggtggctggcataatatgttaaaaactgtttacagtgatgtagaaactccacaccttatgggttgggattatccaaaatgtgacagagccatgcctaacatgcttaggataatggcctctcttgttcttgctcgcaaacataacacttgctgtaacttatcacaccgtttctacaggttagctaacgagtgtgcgcaagtattaagtgagatggtcatgtgtggcggctcactatatgttaaaccaggtggaacatcatccggtgatgctacaactgcttatgctaatagtgtctttaacatttgtcaagctgttacagccaatgtaaatgcacttctttcaactgatggtaataagatagctgacaagtatgtccgcaatctacaacacaggctctatgagtgtctctatagaaatagggatgttgatcatgaattcgtggatgagttttacgcttacctgcgtaaacatttctccatgatgattctttctgatgatgccgttgtgtgctataacagtaactatgcggctcaaggtttagtagctagcattaagaactttaaggcagttctttattatcaaaataatgtgttcatgtctgaggcaaaatgttggactgagactgaccttactaaaggacctcacgaattttgctcacagcatacaatgctagttaaacaaggagatgattacgtgtacctgccttacccagatccatcaagaatattaggcgcaggctgttttgtcgatgatattgtcaaaacagatggtacacttatgattgaaaggttcgtgtcactggctattgatgcttacccacttacaaaacatcctaatcaggagtatgctgatgtctttcacttgtatttacaatacattagaaagttacatgatgagcttactggccacatgttggacatgtattccgtaatgctaactaatgataacacctcacggtactgggaacctgagttttatgaggctatgtacacaccacatacagtcttgcaggctgtaggtgcttgtgtattgtgcaattcacagacttcacttcgttgcggtgcctgtattaggagaccattcctatgttgcaagtgctgctatgaccatgtcatttcaacatcacacaaattagtgttgtctgttaatccctatgtttgcaatgccccaggttgtgatgtcactgatgtgacacaactgtatctaggaggtatgagctattattgcaagtcacataagcctcccattagttttccattatgtgctaatggtcaggtttttggtttatacaaaaacacatgtgtaggcagtgacaatgtcactgacttcaatgcgatagcaacatgtgattggactaatgctggcgattacatacttgccaacacttgtactgagagactcaagcttttcgcagcagaaacgctcaaagccactgaggaaacatttaagctgtcatatggtattgccactgtacgcgaagtactctctgacagagaattgcatctttcatgggaggttggaaaacctagaccaccattgaacagaaactatgtctttactggttaccgtgtaactaaaaatagtaaagtacagattggagagtacacctttgaaaaaggtgactatggtgatgctgttgtgtacagaggtactacgacatacaagttgaatgttggtgattactttgtgttgacatctcacactgtaatgccacttagtgcacctactctagtgccacaagagcactatgtgagaattactggcttgtacccaacactcaacatctcagatgagttttctagcaatgttgcaaattatcaaaaggtcggcatgcaaaagtactctacactccaaggaccacctggtactggtaagagtcattttgccatcggacttgctctctattacccatctgctcgcatagtgtatacggcatgctctcatgcagctgttgatgccctatgtgaaaaggcattaaaatatttgcccatagataaatgtagtagaatcatacctgcgcgtgcgcgcgtagagtgttttgataaattcaaagtgaattcaacactagaacagtatgttttctgcactgtaaatgcattgccagaaacaactgctgacattgtagtctttgatgaaatctctatggctactaattatgacttgagtgttgtcaatgctagacttcgtgcaaaacactacgtctatattggcgatcctgctcaattaccagccccccgcacattgctgactaaaggcacactagaaccagaatattttaattcagtgtgcagacttatgaaaacaataggtccagacatgttccttggaacttgtcgccgttgtcctgctgaaattgttgacactgtgagtgctttagtttatgacaataagctaaaagcacacaaggagaagtcagctcaatgcttcaaaatgttctacaaaggtgttattacacatgatgtttcatctgcaatcaacagacctcaaataggcgttgtaagagaatttcttacacgcaatcctgcttggagaaaagctgtttttatctcaccttataattcacagaacgctgtagcttcaaaaatcttaggattgcctacgcagactgttgattcatcacagggttctgaatatgactatgtcatattcacacaaactactgaaacagcacactcttgtaatgtcaaccgcttcaatgtggctatcacaagggcaaaaattggcattttgtgcataatgtctgatagggatctttatgacaaactgcaatttacaagtctagaaataccacgtcgcaatgtggctacattacaagcagaaaatgtaactggactttttaaggactgtagtaagatcattactggtcttcatcctacacaggcacctacacacctcagcgttgatataaagttcaagactgaaggattatgtgttgacataccaggcataccaaaggacatgacctaccgtagactcatctctatgatgggtttcaaaatgaattaccaagtcaatggttaccctaatatgtttatcacccgcgaagaagctattcgtcacgttcgtgcgtggattggctttgatgtagagggctgtcatgcaactagagatgctgtgggtactaacctacctctccagctaggattttctacaggtgttaacttagtagctgtaccgactggttatgttgacactgaaaataacacagaattcaccagagttaatgcaaaacctccaccaggtgaccagtttaaacatcttataccactcatgtataaaggcttgccctggaatgtagtgcgtattaagatagtacaaatgctcagtgatacactgaaaggattgtcagacagagtcgtgttcgtcctttgggcgcatggctttgagcttacatcaatgaagtactttgtcaagattggacctgaaagaacgtgttgtctgtgtgacaaacgtgcaacttgcttttctacttcatcagatacttatgcctgctggaatcattctgtgggttttgactatgtctataacccatttatgattgatgttcagcagtggggctttacgggtaaccttcagagtaaccatgaccaacattgccaggtacatggaaatgcacatgtggctagttgtgatgctatcatgactagatgtttagcagtccatgagtgctttgttaagcgcgttgattggtctgttgaataccctattataggagatgaactgagggttaattctgcttgcagaaaagtacaacacatggttgtgaagtctgcattgcttgctgataagtttccagttcttcatgacattggaaatccaaaggctatcaagtgtgtgcctcaggctgaagtagaatggaagttctacgatgctcagccatgtagtgacaaagcttacaaaatagaggaactcttctattcttatgctacacatcacgataaattcactgatggtgtttgtttgttttggaattgtaacgttgatcgttacccagccaatgcaattgtgtgtaggtttgacacaagagtcttgtcaaacttgaacttaccaggctgtgatggtggtagtttgtatgtgaataagcatgcattccacactccagctttcgataaaagtgcatttactaatttaaagcaattgcctttcttttactattctgatagtccttgtgagtctcatggcaaacaagtagtgtcggatattgattatgttccactcaaatctgctacgtgtattacacgatgcaatttaggtggtgctgtttgcagacaccatgcaaatgagtaccgacagtacttggatgcatataatatgatgatttctgctggatttagcctatggatttacaaacaatttgatacttataacctgtggaatacatttaccaggttacagagtttagaaaatgtggcttataatgttgttaataaaggacactttgatggacacgccggcgaagcacctgtttccatcattaataatgctgtttacacaaaggtagatggtattgatgtggagatctttgaaagtaagacaacacttcctgttaatgttgcatttgagctttgggctaagcgtaacattaaaccagtgccagagattaagatactcaataatttgggtgttgatatcgctgctaatactgtaatctgggactacaaaagagaagccccagcacatgtgtctacaataggtgtctgcacaatgactgacattgccaagaaacctactgagagtgcttgttcttcacttactgtcttgtttgatggtagagtggaaggacaggtagacctttttagaaacgcccgtaatggtgttttaataacagaaggttcagtcaaaggtctaacaccttcaaagggaccagcacaagctagcgtcaatggagtcacattaattggagaatcagtaaaaacacagtttaactactttaagaaagtagacggcattattcaacagttgcctgaaacctactttactcagagcagagacttagaggattttaagcccagatcacaaatggaaactgactttctcgagctcgctatggatgaattcatacagcgatataagctcgagggctatgccttcgaacacatcgtttatggagatttcagtcatggacaacttggcggtcttcatttaatgataggcttagccaagcgctcacaagattcaccacttaaattagaggattttatccctatggacagcacagtgaaaaattacttcataacagatgcgcaaacaggttcatcaaaatgtgtgcgttctgtgattgatcttttacttgatgactttgtcgagataataaagtcacaagatttgtcagtgatttcaaaagtggtcaaggttacaattgactatgctgaaatttcattcatgctttggtgtaaggatggacatgttgaaaccttctacccaaaactacaagcaagtcaagcgtggcaaccaggtgttgcgatgcctaacttgtacaagatgcaaagaatgcttcttgaaaagtgtgaccttcagaattatggtgaaaatgctgttataccaaaaggaataatgatgaatgtcgcaaagtatactcaactgtgtcaatacttaaatacacttactttagctgtaccctacaacatgagagttattcactttggtgctggctctgataaaggagttgcaccaggtacagctgtgctcagacaatggttgccaactggcacactacttgtcgattcagatcttaatgacttcgtctccgacgcagattctactttaattggagactgtgcaacagtacatacggctaataaatgggaccttattattagcgatatgtatgaccctaggaccaaacatgtgacaaaagagaatgactctaaagaagggtttttcacttatctgtgtggatttataaagcaaaaactagccctgggtggttctatagctgtaaagataacagagcattcttggaatgctgacctttacaagcttatgggccatttctcatggtggacagcttttgttacaaatgtaaatgcatcatcatcggaagcatttttaattggggctaactatcttggcaagccgaaggaacaaattgatggctataccatgcatgctaactacattttctggaggaacacaaatcctatccagttgtcttcctattcactctttgacatgagcaaatttcctcttaaattaagaggaactgctgtaatgtctcttaaggagaatcaaatcaatgatatgatttattctcttctggaaaaaggtaggcttatcattagagaaaacaacagagttgtggtttcaagtgatattcttgttaacaactaaacgaacatgtttattttcttattatttcttactctcactagtggtagtgaccttgaccggtgcaccacttttgatgatgttcaagctcctaattacactcaacatacttcatctatgaggggggtttactatcctgatgaaatttttagatcagacactctttatttaactcaggatttatttcttccattttattctaatgttacagggtttcatactattaatcatacgtttggcaaccctgtcataccttttaaggatggtatttattttgctgccacagagaaatcaaatgttgtccgtggttgggtttttggttctaccatgaacaacaagtcacagtcggtgattattattaacaattctactaatgttgttatacgagcatgtaactttgaattgtgtgacaaccctttctttgctgtttctaaacccatgggtacacagacacatactatgatattcgataatgcatttaattgcactttcgagtacatatctgatgccttttcgcttgatgtttcagaaaagtcaggtaattttaaacacttacgagagtttgtgtttaaaaataaagatgggtttctctaygtttataagggctatcaacctatagatgtagttcgtgatctaccttctggttttaacactttgaaacctatttttaagttgcctcttggtattaacattacaaattttagagccattcttacagccttttcacctgctcaagacatttggggcacgtcagctgcagcctattttgttggctatttaaagccaactacatttatgctcaagtatgatgaaaatggtacaatcacagatgctgttgattgttctcaaaatccacttgctgaactcaaatgctctgttaagagctttgagattgacaaaggaatttaccagacctctaatttcagggttgttccctcaggagatgttgtgagattccctaatattacaaacttgtgtccttttggagaggtttttaatgctactaaattcccttctgtctatgcatgggagagaaaaaaaatttctaattgtgttgctgattactctgtgctctacaactcaacatttttttcaacctttaagtgctatggcgtttctgccactaagttgaatgatctttgcttctccaatgtctatgcagattcttttgtagtcaagggagatgatgtaagacaaatagcgccaggacaaactggtgttattgctgattataattataaattgccagatgatttcatgggttgtgtccttgcttggaatactaggaacattgatgctacttcaactggtaattataattataaatataggtatcttagacatggcaagcttaggccctttgagagagacatatctaatgtgcctttctcccctgatggcaaaccttgcaccccacctgctcttaattgttattggccattaaatgattatggtttttacaccactactggcattggctaccaaccttacagagttgtagtactttcttttgaacttttaaatgcaccggccacggtttgtggaccaaaattatccactgaccttattaagaaccagtgtgtcaattttaattttaatggactcactggtactggtgtgttaactccttcttcaaagagatttcaaccatttcaacaatttggccgtgatgtttctgatttcactgattccgttcgagatcctaaaacatctgaaatattagacatttcaccttgcgcttttgggggtgtaagtgtaattacacctggaacaaatgcttcatctgaagttgctgttctatatcaagatgttaactgcactaatgtttctgcagcaattcatgcagatcaactcacaccagcttggcgcatatattctactggaaacaatgtattccagactcaagcaggctgtcttataggagctgagcatgtcgacacttcttatgagtgcgacattcctattggagctggcatttgtgctagttaccatacagtttctttattacgtagtactagccaaaaatctattgtggcttatactatgtctttaggtgctgatagttcaattgcttactctaataacaccattgctatacctactaacttttcaattagcattactacagaagtaatgcctgtttctatggctaaaacctccgtagattgtaatatgtacatctgcggagattctactgaatgtgctaatttgcttctccaatatggtagcttttgcacacaactaaatcgtgcactctcaggtattgctgctgaacaggatcgcaacacacgtgaagtgttcgctcaagtcaaacaaatgtacaaaaccccaactttgaaatattttggtggttttaatttttcacaaatattacctgaccctctaaagccaactaagaggtcttttattgaggacttgctctttaataaggtgacactcgctgatgctggcttcatgaagcaatatggcgaatgcctaggtgatattaatgctagagatctcatttgtgcgcagaagttcaatggacttacagtgttgccacctctgctcactgatgatatgattgctgcctacactgctgctctagttagtggtactgccactgctggatggacatttggtgctggcgctgctcttcaaataccttttgctatgcaaatggcatataggttcaatggcattggagttacccaaaatgttctctatgagaaccaaaaacaaatcgccaaccaatttaacaaggcgattagtcaaattcaagaatcacttacaacaacatcaactgcattgggcaagctgcaagacgttgttaaccagaatgctcaagcattaaacacacttgttaaacaacttagctctaattttggtgcaatttcaagtgtgctaaatgatatcctttcgcgacttgataaagtcgaggcggaggtacaaattgacaggttaattacaggcagacttcaaagccttcaaacctatgtaacacaacaactaatcagggctgctgaaatcagggcttctgctaatcttgctgctactaaaatgtctgagtgtgttcttggacaatcaaaaagagttgacttttgtggaaagggctaccaccttatgtccttcccacaagcagccccgcatggtgttgtcttcctacatgtcacgtatgtgccatcccaggagaggaacttcaccacagcgccagcaatttgtcatgaaggcaaagcatacttccctcgtgaaggtgtttttgtgtttaatggcacttcttggtttattacacagaggaacttcttttctccacaaataattactacagacaatacatttgtctcaggaaattgtgatgtcgttattggcatcattaacaacacagtttatgatcctctgcaacctgagcttgactcattcaaaggagagctggacaagtacttcaaaaatcatacatcaccagatgttgatcttggcgacatttcaggcattaacgcttctgtcgtcaacattcaaaaagaaattgaccgcctcaatgaggtcgctaaaaatttaaatgaatcactcattgaccttcaagaattgggaaaatatgagcaatatattaaatggccttggtatgtttggctcggcttcattgctggactaattgccatcgtcatggttacaatcttgctttgttgcatgactagttgttgcagttgcctcaagggtgcatgctcttgtggttcttgctgcaagtttgatgaggatgactctgagccagttctcaagggtgtcaaattacattacacataaacgaacttatggatttgtttatgagattttttactcttggatcaattactgcacagccagtaaaaattgacaatgcttctcctgcaagtactgctcatgctacagcaacgataccgctacaagcctcactccctttcggatggcttgttattggcgttgcatttcttgctgtttttcagagcgctaccaaaataattgcgctcaataaaagatggcagctagccctttataagggcttccagttcatttgcaatttactgctgctatttgttaccatctattcacatcttttgcttgtcgctgcaggtatggaggcgcaatttttgtacctctatgccttgatatattttctacaatgcatcaacgcatgtagaattattatgagatgttggctttgttggaagtgcaaatccaagaacccattactttatgatgccaactactttgtttgctggcacacacataactatgactactgtataccatataacagtgtcacagatacaattgtcgttactgaaggtgacggcatttcaacaccaaaactcaaagaagactaccaaattggtggttattctgaggataggcactcaggtgttaaagactatgtcgttgtacatggctatttcaccgaagtttactaccagcttgagtctacacaaattactacaaacactggtattgaaaatgctacattcttcatctttaacaagcttgttaaagacccaccgaatgtgcaaatacacacaatcgacggctcttcaggagttgctaatccagcaatggatccaatttatgatgagccgacgacgactactagcgtgcctttgtaagcacaagaaagtgagtacgaacttatgtactcattcgtttcggaagaaacaggtacgttaatagttaatagcgtacttctttttcttgctttcgtggtattcttgctagtcacactagccatccttactgcgcttcgattgtgtgcgtactgctgcaatattgttaacgtgagtttagtaaaaccaacggtttacgtctactcgcgtgttaaaaatctgaactcttctgaaggagttcctgatcttctggtctaaacgaactaactattattattattctgtttggaactttaacattgcttatcatggcagacaacggtactattaccgttgaggagcttaaacaactcctggaacaatggaacctagtaataggtttcctattcctagcctggattatgttactacaatttgcctattctaatcggaacaggtttttgtacataataaagcttgttttcctctggctcttgtggccagtaacacttgcttgttttgtgcttgctgctgtctacagaattaattgggtgactggcgggattgcgattgcaatggcttgtattgtaggcttgatgtggcttagctacttcgttgcttccttcaggctgtttgctcgtacccgctcaatgtggtcattcaacccggaaacaaacattcttcccaatgtgcctctccgggggacaattgtgaccagaccgctcatggaaagtgaacttgtcattggtgctgtgatcattcgtggtcacttgcgaatggccggacactccctagggcgctgtgacattaaggacctgccaaaagagatcactgtggctacatcacgaacgctttcttattacaaattaggagcgtcgcagcgtgtaggcactgattcaggttttgctgcatacaaccgctaccgtattggaaactataaattaaatacagaccacgccggtagcaacgacaatattgctttgctagtacagtaagtgacaacagatgtttcatcttgttgacttccaggttacaatagcagagatattgattatcattatgaggactttcaggattgctatttggaatcttgacgttataataagttcaatagtgagacaattatttaagcctctaactaagaagaattattcggagttagatgatgaagaacctatggagttagattatccataaaacgaacatgaaaattattctcttcctgacattgattgtatttacatcttgcgagctatatcactatcaggagtgtgttagaggtacgactgtactactaaaagaaccttgcccatcaggaacatacgagggcaattcaccatttcaccctcttgctgacaataaatttgcactaacttgcactagcacacactttgcttttgcttgtgctgacggtactcgacatacctatcagctgcgtgcaagatcagtttcaccaaaacttttcatcagacaagaggaggttcaacaagagctctactcgccactttttctcattgttgctgctctagtatttttaatactttgcttcaccattaagagaaagacagaatgaatgagctcactttaattgacttctatttgtgctttttagcctttctgctattccttgttttaataatgcttattatattttggttttcactcgaaatccaggatctagaagaaccttgtaccaaagtctaaacgaacatgaaacttctcattgttttgacttgtatttctctatgcagttgcatatgcactgtagtacagcgctgtgcatctaataaacctcatgtgcttgaagatccttgtaaggtacaacactaggggtaatacttatagcactgcttggctttgtgctctaggaaaggttttaccttttcatagatggcacactatggttcaaacatgcacacctaatgttactatcaactgtcaagatccagctggtggtgcgcttatagctaggtgttggtaccttcatgaaggtcaccaaactgctgcatttagagacgtacttgttgttttaaataaacgaacaaattaaaatgtctgataatggaccccaatcaaaccaacgtagtgccccccgcattacatttggtggacccacagattcaactgacaataaccagaatggaggacgcaatggggcaaggccaaaacagcgccgaccccaaggtttacccaataatactgcgtcttggttcacagctctcactcagcatggcaaggaggaacttagattccctcgaggccagggcgttccaatcaacaccaatagtggtccagatgaccaaattggctactaccgaagagctacccgacgagttcgtggtggtgacggcaaaatgaaagagctcagccccagatggtacttctattacctaggaactggcccagaagcttcacttccctacggcgctaacaaagaaggcatcgtatgggttgcaactgagggagccttgaatacacccaaagaccacattggcacccgcaatcctaataacaatgctgccaccgtgctacaacttcctcaaggaacaacattgccaaaaggcttctacgcagagggaagcagaggcggcagtcaagcctcttctcgctcctcatcacgtagtcgcggtaattcaagaaattcaactcctggcagcagtaggggaaattctcctgctcgaatggctagcggaggtggtgaaactgccctcgcgctattgctgctagacagattgaaccagcttgagagcaaagtttctggtaaaggccaacaacaacaaggccaaactgtcactaagaaatctgctgctgaggcatctaaaaagcctcgccaaaaacgtactgccacaaaacagtacaacgtcactcaagcatttgggagacgtggtccagaacaaacccaaggaaatttcggggaccaagacctaatcagacaaggaactgattacaaacattggccgcaaattgcacaatttgctccaagtgcctctgcattctttggaatgtcacgcattggcatggaagtcacaccttcgggaacatggctgacttatcatggagccattaaattggatgacaaagatccacaattcaaagacaacgtcatactgctgaacaagcacattgacgcatacaaaacattcccaccaacagagcctaaaaaggacaaaaagaaaaagactgatgaagctcagcctttgccgcagagacaaaagaagcagcccactgtgactcttcttcctgcggctgacatggatgatttctccagacaacttcaaaattccatgagtggagcttctgctgattcaactcaggcataaacactcatgatgaccacacaaggcagatgggctatgtaaacgttttcgcaattccgtttacgatacatagtctactcttgtgcagaatgaattctcgtaactaaacagcacaagtaggtttagttaactttaatctcacatagcaatctttaatcaatgtgtaacattagggaggacttgaaagagccaccacattttcatcgaggccacgcggagtacgatcgagggtacagtgaataatgctagggagagctgcctatatggaagagccctaatgtgtaaa

SEQ ID NO: 29821 - DNA, 29729 bp, SARS Coronavirus
atattaggtttttacctacccaggaaaagccaaccaacctcgatctcttgtagatctgttctctaaacgaactttaaaatctgtgtagctgtcgctcggctgcatgcctagtgcacctacgcagtataaacaataataaattttactgtcgttgacaagaaacgagtaactcgtccctcttctgcagactgcttacggtttcgtccgtgttgcagtcgatcatcagcatacctaggtttcgtccgggtgtgaccgaaaggtaagatggagagccttgttcttggtgtcaacgagaaaacacacgtccaactcagtttgcctgtccttcaggttagagacgtgctagtgcgtggcttcggggactctgtggaagaggccctatcggaggcacgtgaacacctcaaaaatggcacttgtggtctagtagagctggaaaaaggcgtactgccccagcttgaacagccctatgtgttcattaaacgttctgatgccttaagcaccaatcacggccacaaggtcgttgagctggttgcagaaatggacggcattcagtacggtcgtagcggtataacactgggagtactcgtgccacatgtgggcgaaaccccaattgcataccgcaatgttcttcttcgtaagaacggtaataagggagccggtggtcatagctatggcatcgatctaaagtcttatgacttaggtgacgagcttggcactgatcccattgaagattatgaacaaaactggaacactaagcatggcagtggtgcactccgtgaactcactcgtgagctcaatggaggtgcagtcactcgctatgtcgacaacaatttctgtggcccagatgggtaccctcttgattgcatcaaagattttctcgcacgcgcgggcaagtcaatgtgcactctttccgaacaacttgattacatcgagtcgaagagaggtgtctactgctgccgtgaccatgagcatgaaattgcctggttcactgagcgctctgataagagctacgagcaccagacacccttcgaaattaagagtgccaagaaatttgacactttcaaaggggaatgcccaaagtttgtgtttcctcttaactcaaaagtcaaagtcattcaaccacgtgttgaaaagaaaaagactgagggtttcatggggcgtatacgctctgtgtaccctgttgcatctccacaggagtgtaacaatatgcacttgtctaccttgatgaaatgtaatcattgcgatgaagtttcatggcagacgtgcgactttctgaaagccacttgtgaacattgtggcactgaaaatttagttattgaaggacctactacatgtgggtacctacctactaatgctgtagtgaaaatgccatgtcctgcctgtcaagacccagagattggacctgagcatagtgttgcagattatcacaaccactcaaacattgaaactcgactccgcaagggaggtaggactagatgttttggaggctgtgtgtttgcctatgttggctgctataataagcgtgcctactgggttcctcgtgctagtgctgatattggctcaggccatactggcattactggtgacaatgtggagaccttgaatgaggatctccttgagatactgagtcgtgaacgtgttaacattaacattgttggcgattttcatttgaatgaagaggttgccatcattttggcatctttctctgcttctacaagtgcctttattgacactataaagagtcttgattacaagtctttcaaaaccattgttgagtcctgcggtaactataaagttaccaagggaaagcccgtaaaaggtgcttggaacattggacaacagagatcagttttaacaccactgtgtggttttccctcacaggctgctggtgttatcagatcaatttttgcgcgcacacttgatgcagcaaaccactcaattcctgatttgcaaagagcagctgtcaccatacttgatggtatttctgaacagtcattacgtcttgtcgacgccatggtttatacttcagacctgctcaccaacagtgtcattattatggcatatgtaactggtggtcttgtacaacagacttctcagtggttgtctaatcttttgggcactactgttgaaaaactcaggcctatctttgaatggattgaggcgaaacttagtgcaggagttgaatttctcaaggatgcttgggagattctcaaatttctcattacaggtgtttttgacatcgtcaagggtcaaatacaggttgcttcagataacatcaaggattgtgtaaaatgcttcattgatgttgttaacaaggcactcgaaatgtgcattgatcaagtcactatcgctggcgcaaagttgcgatcactcaacttaggtgaagtcttcatcgctcaaagcaagggactttaccgtcagtgtatacgtggcaaggagcagctgcaactactcatgcctcttaaggcaccaaaagaagtaacctttcttgaaggtgattcacatgacacagtacttacctctgaggaggttgttctcaagaacggtgaactcgaagcactcgagacgcccgttgatagcttcacaaatggagctatcgttggcacaccagtctgtgtaaatggcctcatgctcttagagattaaggacaaagaacaatactgcgcattgtctcctggtttactggctacaaacaatgtctttcgcttaaaagggggtgcaccaattaaaggtgtaacctttggagaagatactgtttgggaagttcaaggttacaagaatgtgagaatcacatttgagcttgatgaacgtgttgacaaagtgcttaatgaaaagtgctctgtctacactgttgaatccggtaccgaagttactgagtttgcatgtgttgtagcagaggctgttgtgaagactttacaaccagtttctgatctccttaccaacatgggtattgatcttgatgagtggagtgtagctacattctacttatttgatgatgctggtgaagaaaacttttcatcacgtatgtattgttccttttaccctccagatgaggaagaagaggacgatgcagagtgtgaggaagaagaaattgatgaaacctgtgaacatgagtacggtacagaggatgattatcaaggtctccctctggaatttggtgcctcagctgaaacagttcgagttgaggaagaagaagaggaagactggctggatgatactactgagcaatcagagattgagccagaaccagaacctacacctgaagaaccagttaatcagtttactggttatttaaaacttactgacaatgttgccattaaatgtgttgacatcgttaaggaggcacaaagtgctaatcctatggtgattgtaaatgctgctaacatacacctgaaacatggtggtggtgtagcaggtgcactcaacaaggcaaccaatggtgccatgcaaaaggagagtgatgattacattaagctaaatggccctcttacagtaggagggtcttgtttgctttctggacataatcttgctaagaagtgtctgcatgttgttggacctaacctaaatgcaggtgaggacatccagcttcttaaggcagcatatgaaaatttcaattcacaggacatcttacttgcaccattgttgtcagcaggcatatttggtgctaaaccacttcagtctttacaagtgtgcgtgcagacggttcgtacacaggtttatattgcagtcaatgacaaagctctttatgagcaggttgtcatggattatcttgataacctgaagcctagagtggaagcacctaaacaagaggagccaccaaacacagaagattccaaaactgaggagaaatccgtcgtacagaagcctgtcgatgtgaagccaaaaattaaggcctgcattgatgaggttaccacaacactggaagaaactaagtttcttaccaataagttactcttgtttgctgatatcaatggtaagctttaccatgattctcagaacatgcttagaggtgaagatatgtctttccttgagaaggatgcaccttacatggtaggtgatgttatcactagtggtgatatcacttgtgttgtaataccctccaaaaaggctggtggcactactgagatgctctcaagagctttgaagaaagtgccagttgatgagtatataaccacgtaccctggacaaggatgtgctggttatacacttgaggaagctaagactgctcttaagaaatgcaaatctgcattttatgtactaccttcagaagcacctaatgctaaggaagagattctaggaactgtatcctggaatttgagagaaatgcttgctcatgctgaagagacaagaaaattaatgcctatatgcatggatgttagagccataatggcaaccatccaacgtaagtataaaggaattaaaattcaagagggcatcgttgactatggtgtccgattcttcttttatactagtaaagagcctgtagcttctattattacgaagctgaactctctaaatgagccgcttgtcacaatgccaattggttatgtgacacatggttttaatcttgaagaggctgcgcgctgtatgcgttctcttaaagctcctgccgtagtgtcagtatcatcaccagatgctgttactacatataatggatacctcacttcgtcatcaaagacatctgaggagcactttgtagaaacagtttctttggctggctcttacagagattggtcctattcaggacagcgtacagagttaggtgttgaatttcttaagcgtggtgacaaaattgtgtaccacactctggagagccccgtcgagtttcatcttgacggtgaggttctttcacttgacaaactaaagagtctcttatccctgcgggaggttaagactataaaagtgttcacaactgtggacaacactaatctccacacacagcttgtggatatgtctatgacatatggacagcagtttggtccaacatacttggatggtgctgatgttacaaaaattaaacctcatgtaaatcatgagggtaagactttctttgtactacctagtgatgacacactacgtagtgaagctttcgagtactaccatactcttgatgagagttttcttggtaggtacatgtctgctttaaaccacacaaagaaatggaaatttcctcaagttggtggtttaacttcaattaaatgggctgataacaattgttatttgtctagtgttttattagcacttcaacagcttgaagtcaaattcaatgcaccagcacttcaagaggcttattatagagcccgtgctggtgatgctgctaacttttgtgcactcatactcgcttacagtaataaaactgttggcgagcttggtgatgtcagagaaactatgacccatcttctacagcatgctaatttggaatctgcaaagcgagttcttaatgtggtgtgtaaacattgtggtcagaaaactactaccttaacgggtgtagaagctgtgatgtatatgggtactctatcttatgataatcttaagacaggtgtttccattccatgtgtgtgtggtcgtgatgctacacaatatctagtacaacaagagtcttcttttgttatgatgtctgcaccacctgctgagtataaattacagcaaggtacattcttatgtgcgaatgagtacactggtaactatcagtgtggtcattacactcatataactgctaaggagaccctctatcgtattgacggagctcaccttacaaagatgtcagagtacaaaggaccagtgactgatgttttctacaaggaaacatcttacactacaaccatcaagcctgtgtcgtataaactcgatggagttacttacacagagattgaaccaaaattggatgggtattataaaaaggataatgcttactatacagagcagcctatagaccttgtaccaactcaaccattaccaaatgcgagttttgataatttcaaactcacatgttctaacacaaaatttgctgatgatttaaatcaaatgacaggcttcacaaagccagcttcacgagagctatctgtcacattcttcccagacttgaatggcgatgtagtggctattgactatagacactattcagcgagtttcaagaaaggtgctaaattactgcataagccaattgtttggcacattaaccaggctacaaccaagacaacgttcaaaccaaacacttggtgtttacgttgtctttggagtacaaagccagtagatacttcaaattcatttgaagttctggcagtagaagacacacaaggaatggacaatcttgcttgtgaaagtcaacaacccacctctgaagaagtagtggaaaatcctaccatacagaaggaagtcatagagtgtgacgtgaaaactaccgaagttgtaggcaatgtcatacttaaaccatcagatgaaggtgttaaagtaacacaagagttaggtcatgaggatcttatggctgcttatgtggaaaacacaagcattaccattaagaaacctaatgagctttcactagccttaggtttaaaaacaattgccactcatggtattgctgcaattaatagtgttccttggagtaaaattttggcttatgtcaaaccattcttaggacaagcagcaattacaacatcaaattgcgctaagagattagcacaacgtgtgtttaacaattatatgccttatgtgtttacattattgttccaattgtgtacttttactaaaagtaccaattctagaattagagcttcactacctacaactattgctaaaaatagtgttaagagtgttgctaaattatgtttggatgccggcattaattatgtgaagtcacccaaattttctaaattgttcacaatcgctatgtggctattgttgttaagtatttgcttaggttctctaatctgtgtaactgctgcttttggtgtactcttatctaattttggtgctccttcttattgtaatggcgttagagaattgtatcttaattcgtctaacgttactactatggatttctgtgaaggttcttttccttgcagcatttgtttaagtggattagactcccttgattcttatccagctcttgaaaccattcaggtgacgatttcatcgtacaagctagacttgacaattttaggtctggccgctgagtgggttttggcatatatgttgttcacaaaattcttttatttattaggtctttcagctataatgcaggtgttctttggctattttgctagtcatttcatcagcaattcttggctcatgtggtttatcattagtattgtacaaatggcacccgtttctgcaatggttaggatgtacatcttctttgcttctttctactacatatggaagagctatgttcatatcatggatggttgcacctcttcgacttgcatgatgtgctataagcgcaatcgtgccacacgcgttgagtgtacaactattgttaatggcatgaagagatctttctatgtctatgcaaatggaggccgtggcttctgcaagactcacaattggaattgtctcaattgtgacacattttgcactggtagtacattcattagtgatgaagttgctcgtgatttgtcactccagtttaaaagaccaatcaaccctactgaccagtcatcgtatattgttgatagtgttgctgtgaaaaatggcgcgcttcacctctactttgacaaggctggtcaaaagacctatgagagacatccgctctcccattttgtcaatttagacaatttgagagctaacaacactaaaggttcactgcctattaatgtcatagtttttgatggcaagtccaaatgcgacgagtctgcttctaagtctgcttctgtgtactacagtcagctgatgtgccaacctattctgttgcttgaccaagctcttgtatcagacgttggagatagtactgaagtttccgttaagatgtttgatgcttatgtcgacaccttttcagcaacttttagtgttcctatggaaaaacttaaggcacttgttgctacagctcacagcgagttagcaaagggtgtagctttagatggtgtcctttctacattcgtgtcagctgcccgacaaggtgttgttgataccgatgttgacacaaaggatgttattgaatgtctcaaactttcacatcactctgacttagaagtgacaggtgacagttgtaacaatttcatgctcacctataataaggttgaaaacatgacgcccagagatcttggcgcatgtattgactgtaatgcaaggcatatcaatgcccaagtagcaaaaagtcacaatgtttcactcatctggaatgtaaaagactacatgtctttatctgaacagctgcgtaaacaaattcgtagtgctgccaagaagaacaacataccttttagactaacttgtgctacaactagacaggttgtcaatgtcataactactaaaatctcactcaagggtggtaagattgttagtacttgttttaaacttatgcttaaggccacattattgtgcgttcttgctgcattggtttgttatatcgttatgccagtacatacattgtcaatccatgatggttacacaaatgaaatcattggttacaaagccattcaggatggtgtcactcgtgacatcatttctactgatgattgttttgcaaataaacatgctggttttgacgcatggtttagccagcgtggtggttcatacaaaaatgacaaaagctgccctgtagtagctgctatcattacaagagagattggtttcatagtgcctggcttaccgggtactgtgctgagagcaatcaatggtgacttcttgcattttctacctcgtgtttttagtgctgttggcaacatttgctacacaccttccaaactcattgagtatagtgattttgctacctctgcttgcgttcttgctgctgagtgtacaatttttaaggatgctatgggcaaacctgtgccatattgttatgacactaatttgctagagggttctatttcttatagtgagcttcgtccagacactcgttatgtgcttatggatggttccatcatacagtttcctaacacttacctggagggttctgttagagtagtaacaacttttgatgctgagtactgtagacatggtacatgcgaaaggtcagaagtaggtatttgcctatctaccagtggtagatgggttcttaataatgagcattacagagctctatcaggagttttctgtggtgttgatgcgatgaatctcatagctaacatctttactcctcttgtgcaacctgtgggtgctttagatgtgtctgcttcagtagtggctggtggtattattgccatattggtgacttgtgctgcctactactttatgaaattcagacgtgtttttggtgagtacaaccatgttgttgctgctaatgcacttttgtttttgatgtctttcactatactctgtctggtaccagcttacagctttctgccgggagtctactcagtcttttacttgtacttgacattctatttcaccaatgatgtttcattcttggctcaccttcaatggtttgccatgttttctcctattgtgcctttttggataacagcaatctatgtattctgtatttctctgaagcactgccattggttctttaacaactatcttaggaaaagagtcatgtttaatggagttacatttagtaccttcgaggaggctgctttgtgtacctttttgctcaacaaggaaatgtacctaaaattgcgtagcgagacactgttgccacttacacagtataacaggtatcttgctctatataacaagtacaagtatttcagtggagccttagatactaccagctatcgtgaagcagcttgctgccacttagcaaaggctctaaatgactttagcaactcaggtgctgatgttctctaccaaccaccacagacatcaatcacttctgctgttctgcagagtggttttaggaaaatggcattcccgtcaggcaaagttgaagggtgcatggtacaagtaacctgtggaactacaactcttaatggattgtggttggatgacacagtatactgtccaagacatgtcatttgcacagcagaagacatgcttaatcctaactatgaagatctgctcattcgcaaatccaaccatagctttcttgttcaggctggcaatgttcaacttcgtgttattggccattctatgcaaaattgtctgcttaggcttaaagttgatacttctaaccctaagacacccaagtataaatttgtccgtatccaacctggtcaaacattttcagttctagcatgctacaatggttcaccatctggtgtttatcagtgtgccatgagacctaatcataccattaaaggttctttccttaatggatcatgtggtagtgttggttttaacattgattatgattgcgtgtctttctgctatatgcatcatatggagcttccaacaggagtacacgctggtactgacttagaaggtaaattctatggtccatttgttgacagacaaactgcacaggctgcaggtacagacacaaccataacattaaatgttttggcatggctgtatgctgctgttatcaatggtgataggtggtttcttaatagattcaccactactttgaatgactttaaccttgtggcaatgaagtacaactatgaacctttgacacaagatcatgttgacatattgggacctctttctgctcaaacaggaattgccgtcttagatatgtgtgctgctttgaaagagctgctgcagaatggtatgaatggtcgtactatccttggtagcactattttagaagatgagtttacaccatttgatgttgttagacaatgctctggtgttaccttccaaggtaagttcaagaaaattgttaagggcactcatcattggatgcttttaactttcttgacatcactattgattcttgttcaaagtacacagtggtcactgtttttctttgtttacgagaatgctttcttgccatttactcttggtattatggcaattgctgcatgtgctatgctgcttgttaagcataagcacgcattcttgtgcttgtttctgttaccttctcttgcaacagttgcttactttaatatggtctacatgcctgctagctgggtgatgcgtatcatgacatggcttgaattggctgacactagcttgtctggttataggcttaaggattgtgttatgtatgcttcagctttagttttgcttattctcatgacagctcgcactgtttatgatgatgctgctagacgtgtttggacactgatgaatgtcattacacttgtttacaaagtctactatggtaatgctttagatcaagctatttccatgtgggccttagttatttctgtaacctctaactattctggtgtcgttacgactatcatgtttttagctagagctatagtgtttgtgtgtgttgagtattatccattgttatttattactggcaacaccttacagtgtatcatgcttgtttattgtttcttaggctattgttgctgctgctactttggccttttctgtttactcaaccgttacttcaggcttactcttggtgtttatgactacttggtctctacacaagaatttaggtatatgaactcccaggggcttttgcctcctaagagtagtattgatgctttcaagcttaacattaagttgttgggtattggaggtaaaccatgtatcaaggttgctactgtacagtctaaaatgtctgacgtaaagtgcacatctgtggtactgctctcggttcttcaacaacttagagtagagtcatcttctaaattgtgggcacaatgtgtacaactccacaatgatattcttcttgcaaaagacacaactgaagctttcgagaagatggtttctcttttgtctgttttgctatccatgcagggtgctgtagacattaataggttgtgcgaggaaatgctcgataaccgtgctactcttcaggctattgcttcagaatttagttctttaccatcatatgccgcttatgccactgcccaggaggcctatgagcaggctgtagctaatggtgattctgaagtcgttctcaaaaagttaaagaaatctttgaatgtggctaaatctgagtttgaccgtgatgctgccatgcaacgcaagttggaaaagatggcagatcaggctatgacccaaatgtacaaacaggcaagatctgaggacaagagggcaaaagtaactagtgctatgcaaacaatgctcttcactatgcttaggaagcttgataatgatgcacttaacaacattatcaacaatgcgcgtgatggttgtgttccactcaacatcataccattgactacagcagccaaactcatggttgttgtccctgattatggtacctacaagaacacttgtgatggtaacacctttacatatgcatctgcactctgggaaatccagcaagttgttgatgcggatagcaagattgttcaacttagtgaaattaacatggacaattcaccaaatttggcttggcctcttattgttacagctctaagagccaactcagctgttaaactacagaataatgaactgagtccagtagcactacgacagatgtcctgtgcggctggtaccacacaaacagcttgtactgatgacaatgcacttgcctactataacaattcgaagggaggtaggtttgtgctggcattactatcagaccaccaagatctcaaatgggctagattccctaagagtgatggtacaggtacaatttacacagaactggaaccaccttgtaggtttgttacagacacaccaaaagggcctaaagtgaaatacttgtacttcatcaaaggcttaaacaacctaaatagaggtatggtgctgggcagtttagctgctacagtacgtcttcaggctggaaatgctacagaagtacctgccaattcaactgtgctttccttctgtgcttttgcagtagaccctgctaaagcatataaggattacctagcaagtggaggacaaccaatcaccaactgtgtgaagatgttgtgtacacacactggtacaggacaggcaattactgtaacaccagaagctaacatggaccaagagtcctttggtggtgcttcatgttgtctgtattgtagatgccacattgaccatccaaatcctaaaggattctgtgacttgaaaggtaagtacgtccaaatacctaccacttgtgctaatgacccagtgggttttacacttagaaacacagtctgtaccgtctgcggaatgtggaaaggttatggctgtagttgtgatcaactccgcgaacccttgatgcagtctgcggatgcatcaacgtttttaaacgggtttgcggtgtaagtgcagcccgtcttacaccgtgcggcacaggcactagtactgatgtcgtctacagggcttttgatatttacaacgaaaaagttgctggttttgcaaagttcctaaaaactaattgctgtcgcttccaggagaaggatgaggaaggcaatttattagactcttactttgtagttaagaggcatactatgtctaactaccaacatgaagagactatttataacttggttaaagattgtccagcggttgctgtccatgactttttcaagtttagagtagatggtgacatggtaccacatatatcacgtcagcgtctaactaaatacacaatggctgatttagtctatgctctacgtcattttgatgagggtaattgtgatacattaaaagaaatactcgtcacatacaattgctgtgatgatgattatttcaataagaaggattggtatgacttcgtagagaatcctgacatcttacgcgtatatgctaacttaggtgagcgtgtacgccaatcattattaaagactgtacaattctgcgatgctatgcgtgatgcaggcattgtaggcgtactgacattagataatcaggatcttaatgggaactggtacgatttcggtgatttcgtacaagtagcaccaggctgcggagttcctattgtggattcatattactcattgctgatgcccatcctcactttgactagggcattggctgctgagtcccatatggatgctgatctcgcaaaaccacttattaagtgggatttgctgaaatatgattttacggaagagagactttgtctcttcgaccgttattttaaatattgggaccagacataccatcccaattgtattaactgtttggatgataggtgtatccttcattgtgcaaactttaatgtgttattttctactgtgtttccacctacaagttttggaccactagtaagaaaaatatttgtagatggtgttccttttgttgtttcaactggataccattttcgtgagttaggagtcgtacataatcaggatgtaaacttacatagctcgcgtctcagtttcaaggaacttttagtgtatgctgctgatccagctatgcatgcagcttctggcaatttattgctagataaacgcactacatgcttttcagtagctgcactaacaaacaatgttgcttttcaaactgtcaaacccggtaattttaataaagacttttatgactttgctgtgtctaaaggtttctttaaggaaggaagttctgttgaactaaaacacttcttctttgctcaggatggcaacgctgctatcagtgattatgactattatcgttataatctgccaacaatgtgtgatatcagacaactcctattcgtagttgaagttgttgataaatactttgattgttacgatggtggctgtattaatgccaaccaagtaatcgttaacaatctggataaatcagctggtttcccatttaataaatggggtaaggctagactttattatgactcaatgagttatgaggatcaagatgcacttttcgcgtatactaagcgtaatgtcatccctactataactcaaatgaatcttaagtatgccattagtgcaaagaatagagctcgcaccgtagctggtgtctctatctgtagtactatgacaaatagacagtttcatcagaaattattgaagtcaatagccgccactagaggagctactgtggtaattggaacaagcaagttttacggtggctggcataatatgttaaaaactgtttacagtgatgtagaaactccacaccttatgggttgggattatccaaaatgtgacagagccatgcctaacatgcttaggataatggcctctcttgttcttgctcgcaaacataacacttgctgtaacttatcacaccgtttctacaggttagctaacgagtgtgcgcaagtattaagtgagatggtcatgtgtggcggctcactatatgttaaaccaggtggaacatcatccggtgatgctacaactgcttatgctaatagtgtctttaacatttgtcaagctgttacagccaatgtaaatgcacttctttcaactgatggtaataagatagctgacaagtatgtccgcaatctacaacacaggctctatgagtgtctctatagaaatagggatgttgatcatgaattcgtggatgagttttacgcttacctgcgtaaacatttctccatgatgattctttctgatgatgccgttgtgtgctataacagtaactatgcggctcaaggtttagtagctagcattaagaactttaaggcagttctttattatcaaaataatgtgttcatgtctgaggcaaaatgttggactgagactgaccttactaaaggacctcacgaattttgctcacagcatacaatgctagttaaacaaggagatgattacgtgtacctgccttacccagatccatcaagaatattaggcgcaggctgttttgtcgatgatattgtcaaaacagatggtacacttatgattgaaaggttcgtgtcactggctattgatgcttacccacttacaaaacatcctaatcaggagtatgctgatgtctttcacttgtatttacaatacattagaaagttacatgatgagcttactggccacatgttggacatgtattccgtaatgctaactaatgataacacctcacggtactgggaacctgagttttatgaggctatgtacacaccacatacagtcttgcaggctgtaggtgcttgtgtattgtgcaattcacagacttcacttcgttgcggtgcctgtattaggagaccattcctatgttgcaagtgctgctatgaccatgtcatttcaacatcacacaaattagtgttgtctgttaatccctatgtttgcaatgccccaggttgtgatgtcactgatgtgacacaactgtatctaggaggtatgagctattattgcaagtcacataagcctcccattagttttccattatgtgctaatggtcaggtttttggtttatacaaaaacacatgtgtaggcagtgacaatgtcactgacttcaatgcgatagcaacatgtgattggactaatgctggcgattacatacttgccaacacttgtactgagagactcaagcttttcgcagcagaaacgctcaaagccactgaggaaacatttaagctgtcatatggtattgccactgtacgcgaagtactctctgacagagaattgcatctttcatgggaggttggaaaacctagaccaccattgaacagaaactatgtctttactggttaccgtgtaactaaaaatagtaaagtacagattggagagtacacctttgaaaaaggtgactatggtgatgctgttgtgtacagaggtactacgacatacaagttgaatgttggtgattactttgtgttgacatctcacactgtaatgccacttagtgcacctactctagtgccacaagagcactatgtgagaattactggcttgtacccaacactcaacatctcagatgagttttctagcaatgttgcaaattatcaaaaggtcggcatgcaaaagtactctacactccaaggaccacctggtactggtaagagtcattttgccatcggacttgctctctattacccatctgctcgcatagtgtatacggcatgctctcatgcagctgttgatgccctatgtgaaaaggcattaaaatatttgcccatagataaatgtagtagaatcatacctgcgcgtgcgcgcgtagagtgttttgataaattcaaagtgaattcaacactagaacagtatgttttctgcactgtaaatgcattgccagaaacaactgctgacattgtagtctttgatgaaatctctatggctactaattatgacttgagtgttgtcaatgctagacttcgtgcaaaacactacgtctatattggcgatcctgctcaattaccagccccccgcacattgctgactaaaggcacactagaaccagaatattttaattcagtgtgcagacttatgaaaacaataggtccagacatgttccttggaacttgtcgccgttgtcctgctgaaattgttgacactgtgagtgctttagtttatgacaataagctaaaagcacacaaggataagtcagctcaatgcttcaaaatgttctacaaaggtgttattacacatgatgtttcatctgcaatcaacagacctcaaataggcgttgtaagagaatttcttacacgcaatcctgcttggagaaaagctgtttttatctcaccttataattcacagaacgctgtagcttcaaaaatcttaggattgcctacgcagactgttgattcatcacagggttctgaatatgactatgtcatattcacacaaactactgaaacagcacactcttgtaatgtcaaccgcttcaatgtggctatcacaagggcaaaaattggcattttgtgcataatgtctgatagagatctttatgacaaactgcaatttacaagtctagaaataccacgtcgcaatgtggctacattacaagcagaaaatgtaactggactttttaaggactgtagtaagatcattactggtcttcatcctacacaggcacctacacacctcagcgttgatataaagttcaagactgaaggattatgtgttgacataccaggcataccaaaggacatgacctaccgtagactcatctctatgatgggtttcaaaatgaattaccaagtcaatggttaccctaatatgtttatcacccgcgaagaagctattcgtcacgttcgtgcgtggattggctttgatgtagagggctgtcatgcaactagagatgctgtgggtactaacctacctctccagctaggattttctacaggtgttaacttagtagctgtaccgactggttatgttgacactgaaaataacacagaattcaccagagttaatgcaaaacctccaccaggtgaccagtttaaacatcttataccactcatgtataaaggcttgccctggaatgtagtgcgtattaagatagtacaaatgctcagtgatacactgaaaggattgtcagacagagtcgtgttcgtcctttgggcgcatggctttgagcttacatcaatgaagtactttgtcaagattggacctgaaagaacgtgttgtctgtgtgacaaacgtgcaacttgcttttctacttcatcagatacttatgcctgctggaatcattctgtgggttttgactatgtctataacccatttatgattgatgttcagcagtggggctttacgggtaaccttcagagtaaccatgaccaacattgccaggtacatggaaatgcacatgtggctagttgtgatgctatcatgactagatgtttagcagtccatgagtgctttgttaagcgcgttgattggtctgttgaataccctattataggagatgaactgagggttaattctgcttgcagaaaagtacaacacatggttgtgaagtctgcattgcttgctgataagtttccagttcttcatgacattggaaatccaaaggctatcaagtgtgtgcctcaggctgaagtagaatggaagttctacgatgctcagccatgtagtgacaaagcttacaaaatagaggaactcttctattcttatgctacacatcacgataaattcactgatggtgtttgtttgttttggaattgtaacgttgatcgttacccagccaatgcaattgtgtgtaggtttgacacaagagtcttgtcaaacttgaacttaccaggctgtgatggtggtagtttgtatgtgaataagcatgcattccacactccagctttcgataaaagtgcatttactaatttaaagcaattgcctttcttttactattctgatagtccttgtgagtctcatggcaaacaagtagtgtcggatattgattatgttccactcaaatctgctacgtgtattacacgatgcaatttaggtggtgctgtttgcagacaccatgcaaatgagtaccgacagtacttggatgcatataatatgatgatttctgctggatttagcctatggatttacaaacaatttgatacttataacctgtggaatacatttaccaggttacagagtttagaaaatgtggcttataatgttgttaataaaggacactttgatggacacgccggcgaagcacctgtttccatcattaataatgctgtttacacaaaggtagatggtattgatgtggagatctttgaaaataagacaacacttcctgttaatgttgcatttgagctttgggctaagcgtaacattaaaccagtgccagagattaagatactcaataatttgggtgttgatatcgctgctaatactgtaatctgggactacaaaagagaagccccagcacatgtatctacaataggtgtctgcacaatgactgacattgccaagaaacctactgagagtgcttgttcttcacttactgtcttgtttgatggtagagtggaaggacaggtagacctttttagaaacgcccgtaatggtgttttaataacagaaggttcagtcaaaggtctaacaccttcaaagggaccagcacaagctagcgtcaatggagtcacattaattggagaatcagtaaaaacacagtttaactactttaagaaagtagacggcattattcaacagttgcctgaaacctactttactcagagcagagacttagaggattttaagcccagatcacaaatggaaactgactttctcgagctcgctatggatgaattcatacagcgatataagctcgagggctatgccttcgaacacatcgtttatggagatttcagtcatggacaacttggcggtcttcatttaatgataggcttagccaagcgctcacaagattcaccacttaaattagaggattttatccctatggacagcacagtgaaaaattacttcataacagatgcgcaaacaggttcatcaaaatgtgtgtgttctgtgattgatcttttacttgatgactttgtcgagataataaagtcacaagatttgtcagtgatttcaaaagtggtcaaggttacaattgactatgctgaaatttcattcatgctttggtgtaaggatggacatgttgaaaccttctacccaaaactacaagcaagtcaagcgtggcaaccaggtgttgcgatgcctaacttgtacaagatgcaaagaatgcttcttgaaaagtgtgaccttcagaattatggtgaaaatgctgttataccaaaaggaataatgatgaatgtcgcaaagtatactcaactgtgtcaatacttaaatacacttactttagctgtaccctacaacatgagagttattcactttggtgctggctctgataaaggagttgcaccaggtacagctgtgctcagacaatggttgccaactggcacactacttgtcgattcagatcttaatgacttcgtctccgacgcagattctactttaattggagactgtgcaacagtacatacggctaataaatgggaccttattattagcgatatgtatgaccctaggaccaaacatgtgacaaaagagaatgactctaaagaagggtttttcacttatctgtgtggatttataaagcaaaaactagccctgggtggttctatagctgtaaagataacagagcattcttggaatgctgacctttacaagcttatgggccatttctcatggtggacagcttttgttacaaatgtaaatgcatcatcatcggaagcatttttaattggggctaactatcttggcaagccgaaggaacaaattgatggctataccatgcatgctaactacattttctggaggaacacaaatcctatccagttgtcttcctattcactctttgacatgagcaaatttcctcttaaattaagaggaactgctgtaatgtctcttaaggagaatcaaatcaatgatatgatttattctcttctggaaaaaggtaggcttatcattagagaaaacaacagagttgtggtttcaagtgatattcttgttaacaactaaacgaacatgtttattttcttattatttcttactctcactagtggtagtgaccttgaccggtgcaccacttttgatgatgttcaagctcctaattacactcaacatacttcatctatgaggggggtttactatcctgatgaaatttttagatcagacactctttatttaactcaggatttatttcttccattttattctaatgttacagggtttcatactattaatcatacgtttggcaaccctgtcataccttttaaggatggtatttattttgctgccacagagaaatcaaatgttgtccgtggttgggtttttggttctaccatgaacaacaagtcacagtcggtgattattattaacaattctactaatgttgttatacgagcatgtaactttgaattgtgtgacaaccctttctttgctgtttctaaacccatgggtacacagacacatactatgatattcgataatgcatttaattgcactttcgagtacatatctgatgccttttcgcttgatgtttcagaaaagtcaggtaattttaaacacttacgagagtttgtgtttaaaaataaagatgggtttctctatgtttataagggctatcaacctatagatgtagttcgtgatctaccttctggttttaacactttgaaacctatttttaagttgcctcttggtattaacattacaaattttagagccattcttacagccttttcacctgctcaagacatttggggcacgtcagctgcagcctattttgttggctatttaaagccaactacatttatgctcaagtatgatgaaaatggtacaatcacagatgctgttgattgttctcaaaatccacttgctgaactcaaatgctctgttaagagctttgagattgacaaaggaatttaccagacctctaatttcagggttgttccctcaggagatgttgtgagattccctaatattacaaacttgtgtccttttggagaggtttttaatgctactaaattcccttctgtctatgcatgggagagaaaaaaaatttctaattgtgttgctgattactctgtgctctacaactcaacatttttttcaacctttaagtgctatggcgtttctgccactaagttgaatgatctttgcttctccaatgtctatgcagattcttttgtagtcaagggagatgatgtaagacaaatagcgccaggacaaactggtgttattgctgattataattataaattgccagatgatttcatgggttgtgtccttgcttggaatactaggaacattgatgctacttcaactggtaattataattataaatataggtatcttagacatggcaagcttaggccctttgagagagacatatctaatgtgcctttctcccctgatggcaaaccttgcaccccacctgctcttaattgttattggccattaaatgattatggtttttacaccactactggcattggctaccaaccttacagagttgtagtactttcttttgaacttttaaatgcaccggccacggtttgtggaccaaaattatccactgaccttattaagaaccagtgtgtcaattttaattttaatggactcactggtactggtgtgttaactccttcttcaaagagatttcaaccatttcaacaatttggccgtgatgtttctgatttcactgattccgttcgagatcctaaaacatctgaaatattagacatttcaccttgctcttttgggggtgtaagtgtaattacacctggaacaaatgcttcatctgaagttgctgttctatatcaagatgttaactgcactgatgtttctacagcaattcatgcagatcaactcacaccagcttggcgcatatattctactggaaacaatgtattccagactcaagcaggctgtcttataggagctgagcatgtcgacacttcttatgagtgcgacattcctattggagctggcatttgtgctagttaccatacagtttctttattacgtagtactagccaaaaatctattgtggcttatactatgtctttaggtgctgatagttcaattgcttactctaataacaccattgctatacctactaacttttcaattagcattactacagaagtaatgcctgtttctatggctaaaacctccgtagattgtaatatgtacatctgcggagattctactgaatgtgctaatttgcttctccaatatggtagcttttgcacacaactaaatcgtgcactctcaggtattgctgctgaacaggatcgcaacacacgtgaagtgttcgctcaagtcaaacaaatgtacaaaaccccaactttgaaatattttggtggttttaatttttcacaaatattacctgaccctctaaagccaactaagaggtcttttattgaggacttgctctttaataaggtgacactcgctgatgctggcttcatgaagcaatatggcgaatgcctaggtgatattaatgctagagatctcatttgtgcgcagaagttcaatggacttacagtgttgccacctctgctcactgatgatatgattgctgcctacactgctgctctagttagtggtactgccactgctggatggacatttggtgctggcgctgctcttcaaataccttttgctatgcaaatggcatataggttcaatggcattggagttacccaaaatgttctctatgagaaccaaaaacaaatcgccaaccaatttaacaaggcgattagtcaaattcaagaatcacttacaacaacatcaactgcattgggcaagctgcaagacgttgttaaccagaatgctcaagcattaaacacacttgttaaacaacttagctctaattttggtgcaatttcaagtgtgctaaatgatatcctttcgcgacttgataaagtcgaggcggaggtacaaattgacaggttaattacaggcagacttcaaagccttcaaacctatgtaacacaacaactaatcagggctgctgaaatcagggcttctgctaatcttgctgctactaaaatgtctgagtgtgttcttggacaatcaaaaagagttgacttttgtggaaagggctaccaccttatgtccttcccacaagcagccccgcatggtgttgtcttcctacatgtcacgtatgtgccatcccaggagaggaacttcaccacagcgccagcaatttgtcatgaaggcaaagcatacttccctcgtgaaggtgtttttgtgtttaatggcacttcttggtttattacacagaggaacttcttttctccacaaataattactacagacaatacatttgtctcaggaaattgtgatgtcgttattggcatcattaacaacacagtttatgatcctctgcaacctgagcttgactcattcaaagaagagctggacaagtacttcaaaaatcatacatcaccagatgttgatcttggcgacatttcaggcattaacgcttctgtcgtcaacattcaaaaagaaattgaccgcctcaatgaggtcgctaaaaatttaaatgaatcactcattgaccttcaagaattgggaaaatatgagcaatatattaaatggccttggtatgtttggctcggcttcattgctggactaattgccatcgtcatggttacaatcttgctttgttgcatgactagttgttgcagttgcctcaagggtgcatgctcttgtggttcttgctgcaagtttgatgaggatgactctgagccagttctcaagggtgtcaaattacattacacataaacgaacttatggatttgtttatgagattttttactcttggatcaattactgcacagccagtaaaaattgacaatgcttctcctgcaagtactgttcatgctacagcaacgataccgctacaagcctcactccctttcggatggcttgttattggcgttgcatttcttgctgtttttcagagcgctaccaaaataattgcgctcaataaaagatggcagctagccctttataagggcttccagttcatttgcaatttactgctgctatttgttaccatctattcacatcttttgcttgtcgctgcaggtatggaggcgcaatttttgtacctctatgccttgatatattttctacaatgcatcaacgcatgtagaattattatgagatgttggctttgttggaagtgcaaatccaagaacccattactttatgatgccaactactttgtttgctggcacacacataactatgactactgtataccatataacagtgtcacagatacaattgtcgttactgaaggtgacggcatttcaacaccaaaactcaaagaagactaccaaattggtggttattctgaggataggcactcaggtgttaaagactatgtcgttgtacatggctatttcaccgaagtttactaccagcttgagtctacacaaattactacagacactggtattgaaaatgctacattcttcatctttaacaagcttgttaaagacccaccgaatgtgcaaatacacacaatcgacggctcttcaggagttgctaatccagcaatggatccaatttatgatgagccgacgacgactactagcgtgcctttgtaagcacaagaaagtgagtacgaacttatgtactcattcgtttcggaagaaacaggtacgttaatagttaatagcgtacttctttttcttgctttcgtggtattcttgctagttacactagccatccttactgcgcttcgattgtgtgcgtactgctgcaatattgttaacgtgagtttagtaaaaccaacggtttacgtctactcgcgtgttaaaaatctgaactcttctgaaggagttcctgatcttctggtctaaacgaactaactattattattattctgtttggaactttaacattgcttatcatggcagacaacggtactattaccgttgaggagcttaaacaactcctggaacaatggaacctagtaataggtttcctatgcctagcctggattatgttactacaatttgcctattctaatcggaacaggtttttgtacataataaagcttgttttcctctggctcttgtggccagtaacacttgcttgttttgtgcttgctgctgtctacagaattaattgggtgactggcgggattgcgattgcaatggcttgtattgtaggcttgatgtggcttagctacttcgttgcttccttcaggctgtttgctcgtacccgctcaatgtggtcattcaacccagaaacaaacattcttctcaatgtgcctctccgggggacaattgtgaccagaccgctcatggaaagtgaacttgtcattggtgctgtgatcattcgtggtcacttgcgaatggccggacactccctagggcgctgtgacattaaggacctgccaaaagagatcactgtggctacatcacgaacgctttcttattacaaattaggagcgtcgcagcgtgtaggcactgattcaggttttgctgcatacaaccgctaccgtattggaaactataaattaaatacagaccacgccggtagcaacgacaatattgctttgctagtacagtaagtgacaacagatgtttcatcttgttgacttccaggttacaatagcagagatattgattatcattatgaggactttcaggattgctatttggaatcttgacgttataataagttcaatagtgagacaattatttaagcctctaactaagaagaattattcggagttagatgatgaagaacctatggagttagattatccataaaacgaacatgaaaattattctcttcctgacattgattgtatttacatcttgcgagctatatcactatcaggagtgtgttagaggtacgactgtactactaaaagaaccttgcccatcaggaacatacgagggcaattcaccatttcaccctcttgctgacaataaatttgcactaacttgcactagcacacactttgcttttgcttgtgctgacggtactcgacatacctatcagctgcgtgcaagatcagtttcaccaaaacttttcatcagacaagaggaggttcaacaagagctctactcgccactttttctcattgttgctgctctagtatttttaatactttgcttcaccattaagagaaagacagaatgaatgagctcactttaattgacttctatttgtgctttttagcctttctgctattccttgttttaataatgcttattatattttggttttcactcgaaatccaggatctagaagaaccttgtaccaaagtctaaacgaacatgaaacttctcattgttttgacttgtatttctttatgcagttgcatatgcactgtagtacagcgctgtgcatctaataaacctcatgtgcttgaagatccttgtaaggtacaacactaggggtaatacttatagcactgcttggctttgtgctctaggaaaggttttaccttttcatagatggcacactatggttcaaacatgcacacctaatgttactatcaactgtcaagatccagctggtggtgcgcttatagctaggtgttggtaccttcatgaaggtcaccaaactgctgcatttagagacgtacttgttgttttaaataaacgaacaaattaaaatgtctgataatggaccccaatcaaaccaacgtagtgccccccgcattacatttggtggacccacagattcaactgacaataaccagaatggaggacgcaatggggcaaggccaaaacagcgccgaccccaaggtttacccaataatactgcgtcttggttcacagctctcactcagcatggcaaggaggaacttagattccctcgaggccagggcgttccaatcaacaccaatagtggtccagatgaccaaattggctactaccgaagagctacccgacgagttcgtggtggtgacggcaaaatgaaagagctcagccccagatggtacttctattacctaggaactggcccagaagcttcacttccctacggcgctaacaaagaaggcatcgtatgggttgcaactgagggagccttgaatacacccaaagaccacattggcacccgcaatcctaataacaatgctgccaccgtgctacaacttcctcaaggaacaacattgccaaaaggcttctacgcagagggaagcagaggcggcagtcaagcctcttctcgctcctcatcacgtagtcgcggtaattcaagaaattcaactcctggcagcagtaggggaaattctcctgctcgaatggctagcggaggtggtgaaactgccctcgcgctattgctgctagacagattgaaccagcttgagagcaaagtttctggtaaaggccaacaacaacaaggccaaactgtcactaagaaatctgctgctgaggcatctaaaaagcctcgccaaaaacgtactgccacaaaacagtacaacgtcactcaagcatttgggagacgtggtccagaacaaacccaaggaaatttcggggaccaagacctaatcagacaaggaactgattacaaacattggccgcaaattgcacaatttgctccaagtgcctctgcattctttggaatgtcacgcattggcatggaagtcacaccttcgggaacatggctgacttatcatggagccattaaattggatgacaaagatccacaattcaaagacaacgtcatactgctgaacaagcacattgacgcatacaaaacattcccaccaacagagcctaaaaaggacaaaaagaaaaagactgatgaagctcagcctttgccgcagagacaaaagaagcagcccactgtgactcttcttcctgcggctgacatggatgatttctccagacaacttcaaaattccatgagtggagcttctgctgattcaactcaggcataaacactcatgatgaccacacaaggcagatgggctatgtaaacgttttcgcaattccgtttacgatacatagtctactcttgtgcagaatgaattctcgtaactaaacagcacaagtaggtttagttaactttaatctcacatagcaatctttaatcaatgtgtaacattagggaggacttgaaagagccaccacattttcatcgaggccacgcggagtacgatcgagggtacagtgaataatgctagggagagctgcctatatggaagagccctaatgtgtaaaattaattttagtagtgctatccccatgtgattttaatagcttcttaggagaatgacaa

SEQ ID NO: 29822 - DNA, 29727 bp, SARS Coronavirus
atattaggtttttacctacccaggaaaagccaaccaacctcgatctcttgtagatctgttctctaaacgaactttaaaatctgtgtagctgtcgctcggctgcatgcctagtgcacctacgcagtataaacaataataaattttactgtcgttgacaagaaacgagtaactcgtccctcttctgcagactgcttacggtttcgtccgtgttgcagtcgatcatcagcatacctaggtttcgtccgggtgtgaccgaaaggtaagatggagagccttgttcttggtgtcaacgagaaaacacacgtccaactcagtttgcctgtccttcaggttagagacgtgctagtgcgtggcttcggggactctgtggaagaggccctatcggaggcacgtgaacacctcaaaaatggcacttgtggtctagtagagctggaaaaaggcgtactgccccagcttgaacagccctatgtgttcattaaacgttctgatgccttaagcaccaatcacggccacaaggtcgttgagctggttgcagaaatggacggcattcagtacggtcgtagcggtataacactgggagtactcgtgccacatgtgggcgaaaccccaattgcataccgcaatgttcttcttcgtaagaacggtaataagggagccggtggtcatagctatggcatcgatctaaagtcttatgacttaggtgacgagcttggcactgatcccattgaagattatgaacaaaactggaacactaagcatggcagtggtgcactccgtgaactcactcgtgagctcaatggaggtgcagtcactcgctatgtcgacaacaatttctgtggcccagatgggtaccctcttgattgcatcaaagattttctcgcacgcgcgggcaagtcaatgtgcactctttccgaacaacttgattacatcgagtcgaagagaggtgtctactgctgccgtgaccatgagcatgaaattgcctggttcactgagcgctctgataagagctacgagcaccagacacccttcgaaattaagagtgccaagaaatttgacactttcaaaggggaatgcccaaagtttgtgtttcctcttaactcaaaagtcaaagtcattcaaccacgtgttgaaaagaaaaagactgagggtttcatggggcgtatacgctctgtgtaccctgttgcatctccacaggagtgtaacaatatgcacttgtctaccttgatgaaatgtaatcattgcgatgaagtttcatggcagacgtgcgactttctgaaagccacttgtgaacattgtggcactgaaaatttagttattgaaggacctactacatgtgggtacctacctactaatgctgtagtgaaaatgccatgtcctgcctgtcaagacccagagattggacctgagcatagtgttgcagattatcacaaccactcaaacattgaaactcgactccgcaagggaggtaggactagatgttttggaggctgtgtgtttgcctatgttggctgctataataagcgtgcctactgggttcctcgtgctagtgctgatattggctcaggccatactggcattactggtgacaatgtggagaccttgaatgaggatctccttgagatactgagtcgtgaacgtgttaacattaacattgttggcgattttcatttgaatgaagaggttgccatcattttggcatctttctctgcttctacaagtgcctttattgacactataaagagtcttgattacaagtctttcaaaaccattgttgagtcctgcggtaactataaagttaccaagggaaagcccgtaaaaggtgcttggaacattggacaacagagatcagttttaacaccactgtgtggttttccctcacaggctgctggtgttatcagatcaatttttgcgcgcacacttgatgcagcaaaccactcaattcctgatttgcaaagagcagctgtcaccatacttgatggtatttctgaacagtcattacgtcttgtcgacgccatggtttatacttcagacctgctcaccaacagtgtcattattatggcatatgtaactggtggtcttgtacaacagacttctcagtggttgtctaatcttttgggcactactgttgaaaaactcaggcctatctttgaatggattgaggcgaaacttagtgcaggagttgaatttctcaaggatgcttgggagattctcaaatttctcattacaggtgtttttgacatcgtcaagggtcaaatacaggttgcttcagataacatcaaggattgtgtaaaatgcttcattgatgttgttaacaaggcactcgaaatgtgcattgatcaagtcactatcgctggcgcaaagttgcgatcactcaacttaggtgaagtcttcatcgctcaaagcaagggactttaccgtcagtgtatacgtggcaaggagcagctgcaactactcatgcctcttaaggcaccaaaagaagtaacctttcttgaaggtgattcacatgacacagtacttacctctgaggaggttgttctcaagaacggtgaactcgaagcactcgagacgcccgttgatagcttcacaaatggagctatcgttggcacaccagtctgtgtaaatggcctcatgctcttagagattaaggacaaagaacaatactgcgcattgtctcctggtttactggctacaaacaatgtctttcgcttaaaagggggtgcaccaattaaaggtgtaacctttggagaagatactgtttgggaagttcaaggttacaagaatgtgagaatcacatttgagcttgatgaacgtgttgacaaagtgcttaatgaaaagtgctctgtctacactgttgaatccggtaccgaagttactgagtttgcatgtgttgtagcagaggctgttgtgaagactttacaaccagtttctgatctccttaccaacatgggtattgatcttgatgagtggagtgtagctacattctacttatttgatgatgctggtgaagaaaacttttcatcacgtatgtattgttccttttaccctccagatgaggaagaagaggacgatgcagagtgtgaggaagaagaaattgatgaaacctgtgaacatgagtacggtacagaggatgattatcaaggtctccctctggaatttggtgcctcagctgaaacagttcgagttgaggaagaagaagaggaagactggctggatgatactactgagcaatcagagattgagccagaaccagaacctacacctgaagaaccagttaatcagtttactggttatttaaaacttactgacaatgttgccattaaatgtgttgacatcgttaaggaggcacaaagtgctaatcctatggtgattgtaaatgctgctaacatacacctgaaacatggtggtggtgtagcaggtgcactcaacaaggcaaccaatggtgccatgcaaaaggagagtgatgattacattaagctaaatggccctcttacagtaggagggtcttgtttgctttctggacataatcttgctaagaagtgtctgcatgttgttggacctaacctaaatgcaggtgaggacatccagcttcttaaggcagcatatgaaaatttcaattcacaggacatcttacttgcaccattgttgtcagcaggcatatttggtgctaaaccacttcagtctttacaagtgtgcgtgcagacggttcgtacacaggtttatattgcagtcaatgacaaagctctttatgagcaggttgtcatggattatcttgataacctgaagcctagagtggaagcacctaaacaagaggagccaccaaacacagaagattccaaaactgaggagaaatccgtcgtacagaagcctgtcgatgtgaagccaaaaattaaggcctgcattgatgaggttaccacagcactggaagaaactaagtttcttaccaataagttactcttgtttgctgatatcaatggtaagctttaccatgattctcagaacatgcttagaggtgaagatatgtctttccttgagaaggatgcaccttacatggtaggtgatgttatcactagtggtgatatcacttgtgttgtaataccctccaaaaaggctggtggcactactgagatgctctcaagagctttgaagaaagtgccagttgatgagtatataaccacgtaccctggacaaggatgtgctggttatacacttgaggaagctaagactgctcttaagaaatgcaaatctgcattttatgtactaccttcagaagcacctaatgctaaggaagagattctaggaactgtatcctggaatttgagagaaatgcttgctcatgctgaagagacaagaaaattaatgcctatatgcatggatgttagagccataatggcaaccatccaacgtaagtataaaggaattaaaattcaagagggcatcgttgactatggtgtccgattcttcttttatactagtaaagagcctgtagcttctattattacgaagctgaactctctaaatgagccgcttgtcacaatgccaattggttatgtgacacatggttttaatcttgaagaggctgcgcgctgtatgcgttctcttaaagctcctgccgtagtgtcagtatcatcaccagatgctgttactacatataatggatacctcacttcgtcatcaaagacatctgaggagcactttgtagaaacagtttctttggctggctcttacagagattggtcctattcaggacagcgtacagagttaggtgttgaatttcttaagcgtggtgacaaaattgtgtaccacactctggagagccccgtcgagtttcatcttgacggtgaggttctttcacttgacaaactaaagagtctcttatccctgcgggaggttaagactataaaagtgttcacaactgtggacaacactaatctccacacacagcttgtggatatgtctatgacatatggacagcagtttggtccaacatacttggatggtgctgatgttacaaaaattaaacctcatgtaaatcatgagggtaagactttctttgtactacctagtgatgacacactacgtagtgaagctttcgagtactaccatactcttgatgagagttttcttggtaggtacatgtctgctttaaaccacacaaagaaatggaaatttcctcaagttggtggtttaacttcaattaaatgggctgataacaattgttatttgtctagtgttttattagcacttcaacagcttgaagtcaaattcaatgcaccagcacttcaagaggcttattatagagcccgtgctggtgatgctgctaacttttgtgcactcatactcgcttacagtaataaaactgttggcgagcttggtgatgtcagagaaactatgacccatcttctacagcatgctaatttggaatctgcaaagcgagttcttaatgtggtgtgtaaacattgtggtcagaaaactactaccttaacgggtgtagaagctgtgatgtatatgggtactctatcttatgataatcttaagacaggtgtttccattccatgtgtgtgtggtcgtgatgctacacaatatctagtacaacaagagtcttcttttgttatgatgtctgcaccacctgctgagtataaattacagcaaggtacattcttatgtgcgaatgagtacactggtaactatcagtgtggtcattacactcatataactgctaaggagaccctctatcgtattgacggagctcaccttacaaagatgtcagagtacaaaggaccagtgactgatgttttctacaaggaaacatcttacactacaaccatcaagcctgtgtcgtataaactcgatggagttacttacacagagattgaaccaaaattggatgggtattataaaaaggataatgcttactatacagagcagcctatagaccttgtaccaactcaaccattaccaaatgcgagttttgataatttcaaactcacatgttctaacacaaaatttgctgatgatttaaatcaaatgacaggcttcacaaagccagcttcacgagagctatctgtcacattcttcccagacttgaatggcgatgtagtggctattgactatagacactattcagcgagtttcaagaaaggtgctaaattactgcataagccaattgtttggyacattaaccaggctacaaccaagacaacgttcaaaccaaacacttggtgtttacgttgtctttggagtacaaagccagtagatacttcaaattcatttgaagttctggcagtagaagacacacaaggaatggacaatcttgcttgtgaaagtcaacaacccacctctgaagaagtagtggaaaatcctaccatacagaaggaagtcatagagtgtgacgtgaaaactaccgaagttgtaggcaatgtcatacttaaaccatcagatgaaggtgttaaagtaacacaagagttaggtcatgaggatcttatggctgcttatgtggaaaacacaagcattaccattaagaaacctaatgagctttcactagccttaggtttaaaaacaattgccactcatggtattgctgcaattaatagtgttccttggagtaaaattttggcttatgtcaaaccattcttaggacaagcagcaattacaacatcaaattgcgctaagagattagcacaacgtgtgtttaacaattatatgccttatgtgtttacattattgttccaattgtgtacttttactaaaagtaccaattctagaattagagcttcactacctacaactattgctaaaaatagtgttaagagtgttgctaaattatgtttggatgccggcattaattatgtgaagtcacccaaattttctaaattgttcacaatcgctatgtggctattgttgttaagtatttgcttaggttctctaatctgtgtaactgctgcttttggtgtactcttatctaattttggtgctccttcttattgtaatggcgttagagaattgtatcttaattcgtctaacgttactactatggatttctgtgaaggttcttttccttgcagcatttgtttaagtggattagactcccttgattcttatccagctcttgaaaccattcaggtgacgatttcatcgtacaagctagacttgacaattttaggtctggccgctgagtgggttttggcatatatgttgttcacaaaattcttttatttattaggtctttcagctataatgcaggtgttctttggctattttgctagtcatttcatcagcaattcttggctcatgtggtttatcattagtattgtacaaatggcacccgtttctgcaatggttaggatgtacatcttctttgcttctttctactacatatggaagagctatgttcatatcatggatggttgcacctcttcgacttgcatgatgtgctataagcgcaatcgtgccacacgcgttgagtgtacaactattgttaatggcatgaagagatctttctatgtctatgcaaatggaggccgtggcttctgcaagactcacaattggaattgtctcaattgtgacacattttgcactggtagtacattcattagtgatgaagttgctcgtgatttgtcactccagtttaaaagaccaatcaaccctactgaccagtcatcgtatattgttgatagtgttgctgtgaaaaatggcgcgcttcacctctactttgacaaggctggtcaaaagacctatgagagacatccgctctcccattttgtcaatttagacaatttgagagctaacaacactaaaggttcactgcctattaatgtcatagtttttgatggcaagtccaaatgcgacgagtctgcttctaagtctgcttctgtgtactacagtcagctgatgtgccaacctattctgttgcttgaccaagctcttgtatcagacgttggagatagtactgaagtttccgttaagatgtttgatgcttatgtcgacaccttttcagcaacttttagtgttcctatggaaaaacttaaggcacttgttgctacagctcacagcgagttagcaaagggtgtagctttagatggtgtcctttctacattcgtgtcagctgcccgacaaggtgttgttgataccgatgttgacacaaaggatgttattgaatgtctcaaactttcacatcactctgacttagaagtgacaggtgacagttgtaacaatttcatgctcacctataataaggttgaaaacatgacgcccagagatcttggcgcatgtattgactgtaatgcaaggcatatcaatgcccaagtagcaaaaagtcacaatgtttcactcatctggaatgtaaaagactacatgtctttatctgaacagctgcgtaaacaaattcgtagtgctgccaagaagaacaacataccttttagactaacttgtgctacaactagacaggttgtcaatgtcataactactaaaatctcactcaagggtggtaagattgttagtacttgttttaaacttatgcttaaggccacattattgtgcgttcttgctgcattggtttgttatatcgttatgccagtacatacattgtcaatccatgatggttacacaaatgaaatcattggttacaaagccattcaggatggtgtcactcgtgacatcatttctactgatgattgttttgcaaataaacatgctggttttgacgcatggtttagccagcgtggtggttcatacaaaaatgacaaaagctgccctgtagtagctgctatcattacaagagagattggtttcatagtgcctggcttaccgggtactgtgctgagagcaatcaatggtgacttcttgcattttctacctcgtgtttttagtgctgttggcaacatttgctacacaccttccaaactcattgagtatagtgattttgctacctctgcttgcgttcttgctgctgagtgtacaatttttaaggatgctatgggcaaacctgtgccatattgttatgacactaatttgctagagggttctatttcttatagtgagcttcgtccagacactcgttatgtgcttatggatggttccatcatacagtttcctaacacttacctggagggttctgttagagtagtaacaacttttgatgctgagtactgtagacatggtacatgcgaaaggtcagaagtaggtatttgcctatctaccagtggtagatgggttcttaataatgagcattacagagctctatcaggagttttctgtggtgttgatgcgatgaatctcatagctaacatctttactcctcttgtgcaacctgtgggtgctttagatgtgtctgcttcagtagtggctggtggtattattgccatattggtgacttgtgctgcctactactttatgaaattcagacgtgtttttggtgagtacaaccatgttgttgctgctaatgcacttttgtttttgatgtctttcactatactctgtctggtaccagcttacagctttctgccgggagtctactcagtcttttacttgtacttgacattctatttcaccaatgatgtttcattcttggctcaccttcaatggtttgccatgttttctcctattgtgcctttttggataacagcaatctatgtattctgtatttctctgaagcactgccattggttctttaacaactatcttaggaaaagagtcatgtttaatggagttacatttagtaccttcgaggaggctgctttgtgtacctttttgctcaacaaggaaatgtacctaaaattgcgtagcgagacactgttgccacttacacagtataacaggtatcttgctctatataacaagtacaagtatttcagtggagccttagatactaccagctatcgtgaagcagcttgctgccacttagcaaaggctctaaatgactttagcaactcaggtgctgatgttctctaccaaccaccacagacatcaatcacttctgctgttctgcagagtggttttaggaaaatggcattcccgtcaggcaaagttgaagggtgcatggtacaagtaacctgtggaactacaactcttaatggattgtggttggatgacacagtatactgtccaagacatgtcatttgcacagcagaagacatgcttaatcctaactatgaagatctgctcattcgcaaatccaaccatagctttcttgttcaggctggcaatgttcaacttcgtgttattggccattctatgcaaaattgtctgcttaggcttaaagttgatacttctaaccctaagacacccaagtataaatttgtccgtatccaacctggtcaaacattttcagttctagcatgctacaatggttcaccatctggtgtttatcagtgtgccatgagacctaatcataccattaaaggttctttccttaatggatcatgtggtagtgttggttttaacattgattatgattgcgtgtctttctgctatatgcatcatatggagcttccaacaggagtacacgctggtactgacttagaaggtaaattctatggtccatttgttgacagacaaactgcacaggctgcaggtacagacacaaccataacattaaatgttttggcatggctgtatgctgctgttatcaatggtgataggtggtttcttaatagattcaccactactttgaatgactttaaccttgtggcaatgaagtacaactatgaacctttgacacaagatcatgttgacatattgggacctctttctgctcaaacaggaattgccgtcttagatatgtgtgctgctttgaaagagctgctgcagaatggtatgaatggtcgtactatccttggtagcactattttagaagatgagtttacaccatttgatgttgttagacaatgctctggtgttaccttccaaggtaagttcaagaaaattgttaagggcactcatcattggatgcttttaactttcttgacatcactattgattcttgttcaaagtacacagtggtcactgtttttctttgtttacgagaatgctttcttgccatttactcttggtattatggcaattgctgcatgtgctatgctgcttgttaagcataagcacgcattcttgtgcttgtttctgttaccttctcttgcaacagttgcttactttaatatggtctacatgcctgctagctgggtgatgcgtatcatgacatggcttgaattggctgacactagcttgtctggttataggcttaaggattgtgttatgtatgcttcagctttagttttgcttattctcatgacagctcgcactgtttatgatgatgctgctagacgtgtttggacactgatgaatgtcattacacttgtttacaaagtctactatggtaatgctttagatcaagctatttccatgtgggccttagttatttctgtaacctctaactattctggtgtcgttacgactatcatgtttttagctagagctatagtgtttgtgtgtgttgagtattatccattgttatttattactggcaacaccttacagtgtatcatgcttgtttattgtttcttaggctattgttgctgctgctactttggccttttctgtttactcaaccgttacttcaggcttactcttggtgtttatgactacttggtctctacacaagaatttaggtatatgaactcccaggggcttttgcctcctaagagtagtattgatgctttcaagcttaacattaagttgttgggtattggaggtaaaccatgtatcaaggttgctactgtacagtctaaaatgtctgacgtaaagtgcacatctgtggtactgctctcggttcttcaacaacttagagtagagtcatcttctaaattgtgggcacaatgtgtacaactccacaatgatattcttcttgcaaaagacacaactgaagctttcgagaagatggtttctcttttgtctgttttgctatccatgcagggtgctgtagacattaataggttgtgcgaggaaatgctcgataaccgtgctactcttcaggctattgcttcagaatttagttctttaccatcatatgccgcttatgccactgcccaggaggcctatgagcaggctgtagctaatggtgattctgaagtcgttctcaaaaagttaaagaaatctttgaatgtggctaaatctgagtttgaccgtgatgctgccatgcaacgcaagttggaaaagatggcagatcaggctatgacccaaatgtacaaacaggcaagatctgaggacaagagggcaaaagtaactagtgctatgcaaacaatgctcttcactatgcttaggaagcttgataatgatgcacttaacaacattatcaacaatgcgcgtgatggttgtgttccactcaacatcataccattgactacagcagccaaactcatggttgttgtccctgattatggtacctacaagaacacttgtgatggtaacacctttacatatgcatctgcactctgggaaatccagcaagttgttgatgcggatagcaagattgttcaacttagtgaaattaacatggacaattcaccaaatttggcttggcctcttattgttacagctctaagagccaactcagctgttaaactacagaataatgaactgagtccagtagcactacgacagatgtcctgtgcggctggtaccacacaaacagcttgtactgatgacaatgcacttgcctactataacaattcgaagggaggtaggtttgtgctggcattactatcagaccaccaagatctcaaatgggctagattccctaagagtgatggtacaggtacaatttacacagaactggaaccaccttgtaggtttgttacagacacaccaaaagggcctaaagtgaaatacttgtacttcatcaaaggcttaaacaacctaaatagaggtatggtgctgggcagtttagctgctacagtacgtcttcaggctggaaatgctacagaagtacctgccaattcaactgtgctttccttctgtgcttttgcagtagaccctgctaaagcatataaggattacctagcaagtggaggacaaccaatcaccaactgtgtgaagatgttgtgtacacacactggtacaggacaggcaattactgtaacaccagaagctaacatggaccaagagtcctttggtggtgcttcatgttgtctgtattgtagatgccacattgaccatccaaatcctaaaggattctgtgacttgaaaggtaagtacgtccaaatacctaccacttgtgctaatgacccagtgggttttacacttagaaacacagtctgtaccgtctgcggaatgtggaaaggttatggctgtagttgtgaccaactccgcgaacccttgatgcagtctgcggatgcatcaacgtttttaaacgggtttgcggtgtaagtgcagcccgtcttacaccgtgcggcacaggcactagtactgatgtcgtctacagggcttttgatatttacaacgaaaaagttgctggttttgcaaagttcctaaaaactaattgctgtcgcttccaggagaaggatgaggaaggcaatttattagactcttactttgtagttaagaggcatactatgtctaactaccaacatgaagagactatttataacttggttaaagattgtccagcggttgctgtccatgactttttcaagtttagagtagatggtgacatggtaccacatatatcacgtcagcgtctaactaaatacacaatggctgatttagtctatgctctacgtcattttgatgagggtaattgtgatacattaaaagaaatactcgtcacatacaattgctgtgatgatgattatttcaataagaaggattggtatgacttcgtagagaatcctgacatcttacgcgtatatgctaacttaggtgagcgtgtacgccaatcattattaaagactgtacaattctgcgatgctatgcgtgatgcaggcattgtaggcgtactgacattagataatcaggatcttaatgggaactggtacgatttcggtgatttcgtacaagtagcaccaggctgcggagttcctattgtggattcatattactcattgctgatgcccatcctcactttgactagggcattggctgctgagtcccatatggatgctgatctcgcaaaaccacttattaagtgggatttgctgaaatatgattttacggaagagagactttgtctcttcgaccgttattttaaatattgggaccagacataccatcccaattgtattaactgtttggatgataggtgtatccttcattgtgcaaactttaatgtgttattttctactgtgtttccacctacaagttttggaccactagtaagaaaaatatttgtagatggtgttccttttgttgtttcaactggataccattttcgtgagttaggagtcgtacataatcaggatgtaaacttacatagctcgcgtctcagtttcaaggaacttttagtgtatgctgctgatccagctatgcatgcagcttctggcaatttattgctagataaacgcactacatgcttttcagtagctgcactaacaaacaatgttgcttttcaaactgtcaaacccggtaattttaataaagacttttatgactttgctgtgtctaaaggtttctttaaggaaggaagttctgttgaactaaaacacttcttctttgctcaggatggcaacgctgctatcagtgattatgactattatcgttataatctgccaacaatgtgtgatatcagacaactcctattcgtagttgaagttgttgataaatactttgattgttacgatggtggctgtattaatgccaaccaagtaatcgttaacaatctggataaatcagctggtttcccatttaataaatggggtaaggctagactttattatgactcaatgagttatgaggatcaagatgcacttttcgcgtatactaagcgtaatgtcatccctactataactcaaatgaatcttaagtatgccattagtgcaaagaatagagctcgcaccgtagctggtgtctctatctgtagtactatgacaaatagacagtttcatcagaaattattgaagtcaatagccgccactagaggagctactgtggtaattggaacaagcaagttttacggtggctggcataatatgttaaaaactgtttacagtgatgtagaaactccacaccttatgggttgggattatccaaaatttgacagagccatgcctaacatgcttaggataatggcctctcttgttcttgctcgcaaacataacacttgctgtaacttatcacaccgtttctacaggttagctaacgagtgtgcgcaagtattaagtgagatggtcatgtgtggcggctcactatatgttaaaccaggtggaacatcatccggtgatgctacaactgcttatgctaatagtgtctttaacatttgtcaagctgttacagccaatgtaaatgcacttctttcaactgatggtaataagatagctgacaagtatgtccgcaatctacaacacaggctctatgagtgtctctatagaaatagggatgttgatcatgaattcgtggatgagttttacgcttacctgcgtaaacatttctccatgatgattctttctgatgatgccgttgtgtgctataacagtaactatgcggctcaaggtttagtagctagcattaagaactttaaggcagttctttattatcaaaataatgtgttcatgtctgaggcaaaatgttggactgagactgaccttactaaaggacctcacgaattttgctcacagcatacaatgctagttaaacaaggagatgattacgtgtacctgccttacccagatccatcaagaatattaggcgcaggctgttttgtcgatgatattgtcaaaacagatggtacacttatgattgaaaggttcgtgtcactggctattgatgcttacccacttacaaaacatcctaatcaggagtatgctgatgtctttcacttgtatttacaatacattagaaagttacatgatgagcttactggccacatgttggacatgtattccgtaatgctaactaatgataacacctcacggtactgggaacctgagttttatgaggctatgtacacaccacatacagtcttgcaggctgtaggtgcttgtgtattgtgcaattcacagacttcacttcgttgcggtgcctgtattaggagaccattcctatgttgcaagtgctgctatgaccatgtcatttcaacatcacacaaattagtgttgtctgttaatccctatgtttgcaatgccccaggttgtgatgtcactgatgtgacacaactgtatctaggaggtatgagctattattgcaagtcacataagcctcccattagttttccattatgtgctaatggtcaggtttttggtttatacaaaaacacatgtgtaggcagtgacaatgtcactgacttcaatgcgatagcaacatgtgattggactaatgctggcgattacatacttgccaacacttgtactgagagactcaagcttttcgcagcagaaacgctcaaagccactgaggaaacatttaagctgtcatatggtattgccactgtacgcgaagtactctctgacagagaattgcatctttcatgggaggttggaaaacctagaccaccattgaacagaaactatgtctttactggttaccgtgtaactaaaaatagtaaagtacagattggagagtacacctttgaaaaaggtgactatggtgatgctgttgtgtacagaggtactacgacatacaagttgaatgttggtgattactttgtgttgacatctcacactgtaatgccacttagtgcacctactctagtgccacaagagcactatgtgagaattactggcttgtacccaacactcaacatctcagatgagttttctagcaatgttgcaaattatcaaaaggtcggcatgcaaaagtactctacactccaaggaccacctggtactggtaagagtcattttgccatcggacttgctctctattacccatctgctcgcatagtgtatacggcatgctctcatgcagctgttgatgccctatgtgaaaaggcattaaaatatttgcccatagataaatgtagtagaatcatacctgcgcgtgcgcgcgtagagtgttttgataaattcaaagtgaattcaacactagaacagtatgttttctgcactgtaaatgcattgccagaaacaactgctgacattgtagtctttgatgaaatctctatggctactaattatgacttgagtgttgtcaatgctagacttcgtgcaaaacactacgtctatattggcgatcctgctcaattaccagccccccgcacattgctgactaaaggcacactagaaccagaatattttaattcagtgtgcagacttatgaaaacaataggtccagacatgttccttggaacttgtcgccgttgtcctgctgaaattgttgacactgtgagtgctttagtttatgacaataagctaaaagcacacaaggataagtcagctcaatgcttcaaaatgttctacaaaggtgttattacacatgatgtttcatctgcaatcaacagacctcaaataggcgttgtaagagaatttcttacacgcaatcctgcttggagaaaagctgtttttatctcaccttataattcacagaacgctgtagcttcaaaaatcttaggattgcctacgcagactgttgattcatcacagggttctgaatatgactatgtcatattcacacaaactactgaaacagcacactcttgtaatgtcaaccgcttcaatgtggctatcacaagggcaaaaattggcattttgtgcataatgtctgatagagatctttatgacaaactgcaatttacaagtctagaaataccacgtcgcaatgtggctacattacaagcagaaaatgtaactggactttttaaggactgtagtaagatcattactggtcttcatcctacacaggcacctacacacctcagcgttgatataaagttcaagactgaaggattatgtgttgacataccaggcataccaaaggacatgacctaccgtagactcatctctatgatgggtttcaaaatgaattaccaagtcaatggttaccctaatatgtttatcacccgcgaagaagctattcgtcacgttcgtgcgtggattggctttgatgtagagggctgtcatgcaactagagatgctgtgggtactaacctacctctccagctaggattttctacaggtgttaacttagtagctgtaccgactggttatgttgacactgaaaataacacagaattcaccagagttaatgcaaaacctccaccaggtgaccagtttaaacatcttataccactcatgtataaaggcttgccctggaatgtagtgcgtattaagatagtacaaatgctcagtgatacactgaaaggattgtcagacagagtcgtgttcgtcctttgggcgcatggctttgagcttacatcaatgaagtactttgtcaagattggacctgaaagaacgtgttgtctgtgtgacaaacgtgcaacttgcttttctacttcatcagatacttatgcctgctggaatcattctgtgggttttgactatgtctataacccatttatgattgatgttcagcagtggggctttacgggtaaccttcagagtaaccatgaccaacattgccaggtacatggaaatgcacatgtggctagttgtgatgctatcatgactagatgtttagcagtccatgagtgctttgttaagcgcgttgattggtctgttgaataccctattataggagatgaactgagggttaattctgcttgcagaaaagtacaacacatggttgtgaagtctgcattgcttgctgataagtttccagttcttcatgacattggaaatccaaaggctatcaagtgtgtgcctcaggctgaagtagaatggaagttctacgatgctcagccatgtagtgacaaagcttacaaaatagaggaactcttctattcttatgctacacatcacgataaattcactgatggtgtttgtttgttttggaattgtaacgttgatcgttacccagccaatgcaattgtgtgtaggtttgacacaagagtcttgtcaaacttgaacttaccaggctgtgatggtggtagtttgtatgtgaataagcatgcattccacactccagctttcgataaaagtgcatttactaatttaaagcaattgcctttcttttactattctgatagtccttgtgagtctcatggcaaacaagtagtgtcggatattgattatgttccactcaaatctgctacgtgtattacacgatgcaatttaggtggtgctgtttgcagacwccatgcaaatgagtaccgacagtacttggatgcatataatatgatgatttctgctggatttagcctatggatttacaaacaatttgatacttataacctgtggaatacatttaccaggttacagagtttagaaaatgtggcttataatgttgttaataaaggacactttgatggacacgccggcgaagcacctgtttccatcattaataatgctgtttacacaaaggtagatggtattgatgtggagatctttgaaaataagacaacacttcctgttaatgttgcatttgagctttgggctaagcgtaacattaaaccagtgccagagattaagatactcaataatttgggtgttgatatcgctgctaatactgtaatctgggactacaaaagagaagccccagcacatgtatctacaataggtgtctgcacaatgactgacattgccaagaaacctactgagagtgcttgttcttcacttactgtcttgtttgatggtagagtggaaggacaggtagacctttttagaaacgcccgtaatggtgttttaataacagaaggttcagtcaaaggtctaacaccttcaaagggaccagcacaagctagcgtcaatggagtcacattaattggagaatcagtaaaaacacagtttaactactttaagaaagtagacggcattattcaacagttgcctgaaacctactttactcagagcagagacttagaggattttaagcccagatcacaaatggaaactgactttctcgagctcgctatggatgaattcatacagcgatataagctcgagggctatgccttcgaacacatcgtttatggagatttcagtcatggacaacttggcggtcttcatttaatgataggcttagccaagcgctcacaagattcaccacttaaattagaggattttatccctatggacagcacagtgaaaaattacttcataacagatgcgcaaacaggttcatcaaaatgtgtgtgttctgtgattgatcttttacttgatgactttgtcgagataataaagtcacaagatttgtcagtgatttcaaaagtggtcaaggttacaattgactatgctgaaatttcattcatgctttggtgtaaggatggacatgttgaaaccttctacccaaaactacaagcaagtcaagcgtggcaaccaggtgttgcgatgcctaacttgtacaagatgcaaagaatgcttcttgaaaagtgtgaccttcagaattatggtgaaaatgctgttataccaaaaggaataatgatgaatgtcgcaaagtatactcaactgtgtcaatacttaaatacacttactttagctgtaccctacaacatgagagttattcactttggtgctggctctgataaaggagttgcaccaggtacagctgtgctcagacaatggttgccaactggcacactacttgtcgattcagatcttaatgacttcgtctccgacgcagattctactttaattggagactgtgcaacagtacatacggctaataaatgggaccttattattagcgatatgtatgaccctaggaccaaacatgtgacaaaagagaatgactctaaagaagggtttttcacttatctgtgtggatttataaagcaaaaactagccctgggtggttctatagctgtaaagataacagagcattcttggaatgctgacctttacaagcttatgggccatttctcatggtggacagcttttgttacaaatgtaaatgcatcatcatcggaagcatttttaattggggctaactatcttggcaagccgaaggaacaaattgatggctataccatgcatgctaactacattttctggaggaacacaaatcctatccagttgtcttcctattcactctttgacatgagcaaatttcctcttaaattaagaggaactgctgtaatgtctcttaaggagaatcaaatcaatgatatgatttattctcttctggaaaaaggtaggcttatcattagagaaaacaacagagttgtggtttcaagtgatattcttgttaacaactaaacgaacatgtttattttcttattatttcttactctcactagtggtagtgaccttgaccggtgcaccacttttgatgatgttcaagctcctaattacactcaacatacttcatctatgaggggggtttactatcctgatgaaatttttagatcagacactctttatttaactcaggatttatttcttccattttattctaatgttacagggtttcatactattaatcatacgtttggcaaccctgtcataccttttaaggatggtatttattttgctgccacagagaaatcaaatgttgtccgtggttgggtttttggttctaccatgaacaacaagtcacagtcggtgattattattaacaattctactaatgttgttatacgagcatgtaactttgaattgtgtgacaaccctttctttgctgtttctaaacccatgggtacacagacacatactatgatattcgataatgcatttaattgcactttcgagtacatatctgatgccttttcgcttgatgtttcagaaaagtcaggtaattttaaacacttacgagagtttgtgtttaaaaataaagatgggtttctctatgtttataagggctatcaacctatagatgtagttcgtgatctaccttctggttttaacactttgaaacctatttttaagttgcctcttggtattaacattacaaattttagagccattcttacagccttttcacctgctcaagacatttggggcacgtcagctgcagcctattttgttggctatttaaagccaactacatttatgctcaagtatgatgaaaatggtacaatcacagatgctgttgattgttctcaaaatccacttgctgaactcaaatgctctgttaagagctttgagattgacaaaggaatttaccagacctctaatttcagggttgttccctcaggagatgttgtgagattccctaatattacaaacttgtgtccttttggagaggtttttaatgctactaaattcccttctgtctatgcatgggagagaaaaaaaatttctaattgtgttgctgattactctgtgctctacaactcaacatttttttcaacctttaagtgctatggcgtttctgccactaagttgaatgatctttgcttctccaatgtctatgcagattcttttgtagtcaagggagatgatgtaagacaaatagcgccaggacaaactggtgttattgctgattataattataaattgccagatgatttcatgggttgtgtccttgcttggaatactaggaacattgatgctacttcaactggtaattataattataaatataggtatcttagacatggcaagcttaggccctttgagagagacatatctaatgtgcctttctcccctgatggcaaaccttgcaccccacctgctcttaattgttattggccattaaatgattatggtttttacaccactactggcattggctaccaaccttacagagttgtagtactttcttttgaacttttaaatgcaccggccacggtttgtggaccaaaattatccactgaccttattaagaaccagtgtgtcaattttaattttaatggactcactggtactggtgtgttaactccttcttcaaagagatttcaaccatttcaacaatttggccgtgatgtttctgatttcactgattccgttcgagatcctaaaacatctgaaatattagacatttcaccttgctcttttgggggtgtaagtgtaattacacctggaacaaatgcttcatctgaagttgctgttctatatcaagatgttaactgcactgatgtttctacagcaattcatgcagatcaactcacaccagcttggcgcatatattctactggaaacaatgtattccagactcaagcaggctgtcttataggagctgagcatgtcgacacttcttatgagtgcgacattcctattggagctggcatttgtgctagttaccatacagtttctttattacgtagtactagccaaaaatctattgtggcttatactatgtctttaggtgctgatagttcaattgcttactctaataacaccattgctatacctactaacttttcaattagcattactacagaagtaatgcctgtttctatggctaaaacctccgtagattgtaatatgtacatctgcggagattctactgaatgtgctaatttgcttctccaatatggtagcttttgcacacaactaaatcgtgcactctcaggtattgctgctgaacaggatcgcaacacacgtgaagtgttcgctcaagtcaaacaaatgtacaaaaccccaactttgaaatattttggtggttttaatttttcacaaatattacctgaccctctaaagccaactaagaggtcttttattgaggacttgctctttaataaggtgacactcgctgatgctggcttcatgaagcaatatggcgaatgcctaggtgatattaatgctagagatctcatttgtgcgcagaagttcaatggacttacagtgttgccacctctgctcactgatgatatgattgctgcctacactgctgctctagttagtggtactgccactgctggatggacatttggtgctggcgctgctcttcaaataccttttgctatgcaaatggcatataggttcaatggcattggagttacccaaaatgttctctatgagaaccaaaaacaaatcgccaaccaatttaacaaggcgattagtcaaattcaagaatcacttacaacaacatcaactgcattgggcaagctgcaagacgttgttaaccagaatgctcaagcattaaacacacttgttaaacaacttagctctaattttggtgcaatttcaagtgtgctaaatgatatcctttcgcgacttgataaagtcgaggcggaggtacaaattgacaggttaattacaggcagacttcaaagccttcaaacctatgtaacacaacaactaatcagggctgctgaaatcagggcttctgctaatcttgctgctactaaaatgtctgagtgtgttcttggacaatcaaaaagagttgacttttgtggaaagggctaccaccttatgtccttcccacaagcagccccgcatggtgttgtcttcctacatgtcacgtatgtgccatcccaggagaggaacttcaccacagcgccagcaatttgtcatgaaggcaaagcatacttccctcgtgaaggtgtttttgtgtttaatggcacttcttggtttattacacagaggaacttcttttctccacaaataattactacagacaatacatttgtctcaggaaattgtgatgtcgttattggcatcattaacaacacagtttatgatcctctgcaacctgagcttgactcattcaaagaagagctggacaagtacttcaaaaatcatacatcaccagatgttgatcttggcgacatttcaggcattaacgcttctgtcgtcaacattcaaaaagaaattgaccgcctcaatgaggtcgctaaaaatttaaatgaatcactcattgaccttcaagaattgggaaaatatgagcaatatattaaatggccttggtatgtttggctcggcttcattgctggactaattgccatcgtcatggttacaatcttgctttgttgcatgactagttgttgcagttgcctcaagggtgcatgctcttgtggttcttgctgcaagtttgatgaggatgactctgagccagttctcaagggtgtcaaattacattacacataaacgaacttatggatttgtttatgagattttttactcttggatcaattactgcacagccagtaaaaattgacaatgcttctcctgcaagtactgttcatgctacagcaacgataccgctacaagcctcactccctttcggatggcttgttattggcgttgcatttcttgctgtttttcagagcgctaccaaaataattgcgctcaataaaagatggcagctagccctttataagggcttccagttcatttgcaatttactgctgctatttgttaccatctattcacatcttttgcttgtcgctgcaggtatggaggcgcaatttttgtacctctatgccttgatatattttctacaatgcatcaacgcatgtagaattattatgagatgttggctttgttggaagtgcaaatccaagaacccattactttatgatgccaactactttgtttgctggcacacacataactatgactactgtataccatataacagtgtcacagatacaattgtcgttactgaaggtgacggcatttcaacaccaaaactcaaagaagactaccaaattggtggttattctgaggataggcactcaggtgttaaagactatgtcgttgtacatggctatttcaccgaagtttactaccagcttgagtctacacaaattactacagacactggtattgaaaatgctacattcttcatctttaacaagcttgttaaagacccaccgaatgtgcaaatacacacaatcgacggctcttcaggagttgctaatccagcaatggatccaatttatgatgagccgacgacgactactagcgtgcctttgtaagcacaagaaagtgagtacgaacttatgtactcattcgtttcggaagaaacaggtacgttaatagttaatagcgtacttctttttcttgctttcgtggtattcttgctagttacactagccatccttactgcgcttcgattgtgtgcgtactgctgcaatattgttaacgtgagtttagtaaaaccaacggtttacgtctactcgcgtgttaaaaatctgaactcttctgaaggagttcctgatcttctggtctaaacgaactaactattattattattctgtttggaactttaacattgcttatcatggcagacaacggtactattaccgttgaggagcttaaacaactcctggaacaatggaacctagtaataggtttcctatgcctagcctggattatgttactacaatttgcctattctaatcggaacaggtttttgtacataataaagcttgttttcctctggctcttgtggccagtaacacttgcttgttttgtgcttgctgctgtctacagaattaattgggtgactggcgggattgcgattgcaatggcttgtattgtaggcttgatgtggcttagctacttcgttgcttccttcaggctgtttgctcgtacccgctcaatgtggtcattcaactcagaaacaaacattcttctcaatgtgcctctccgggggacaattgtgaccagaccgctcatggaaagtgaacttgtcattggtgctgtgatcattcgtggtcacttgcgaatggccggacactccctagggcgctgtgacattaaggacctgccaaaagagatcactgtggctacatcacgaacgctttcttattacaaattaggagcgtcgcagcgtgtaggcactgattcaggttttgctgcatacaaccgctaccgtattggaaactataaattaaatacagaccacgccggtagcaacgacaatattgctttgctagtacagtaagtgaacagatgtttcatcttgttgacttccaggttacaatagcagagatattgattatcattatgaggactttcaggattgctatttggaatcttgacgttataataagttcaatagtgagacaattatttaagcctctaactaagaagaattattcggagttagatgatgaagaacctatggagttagattatccataaaacgaacatgaaaattattctcttcctgacattgattgtatttacatcttgcgagctatatcactatcaggagtgtgttagaggtacgactgtactactaaaagaaccttgcccatcaggaacatacgagggcaattcaccatttcaccctcttgctgacaataaatttgcactaacttgcactagcacacactttgcttttgcttgtgctgacggtactcgacatacctatcagctgcgtgcaagatcagtttcaccaaaacttttcatcagacaagaggaggttcaacaagagctctactcgccactttttctcattgttgctgctctagtatttttaatactttgcttcaccattaagagaaagacagaatgaatgagctcactttaattgacttctatttgtgctttttagcctttctgctattccttgttttaataatgcttattatattttggttttcactcgaaatccaggatctagaagaaccttgtaccaaagtctaaacgaacatgaaacttctcattgttttgacttgtatttctttatgcagttgcatatgcactgtagtacagcgctgtgcatctaataaacctcatgtgcttgaagatccttgtaaggtacaacactaggggtaatacttatagcactgcttggctttgtgctctaggaaaggttttaccttttcatagatggcacactatggttcaaacatgcacacctaatgttactatcaactgtcaagatccagctggtggtgcgcttatagctaggtgttggtaccttcatgaaggtcaccaaactgctgcatttagagacgtacttgttgttttaaataaacgaacaaattaaaatgtctgataatggaccccaatcaaaccaacgtagtgccccccgcattacatttggtggacccacagattcaactgacaataaccagaatggaggacgcaatggggcaaggccaaaacagcgccgaccccaaggtttacccaataatactgcgtcttggttcacagctctcactcagcatggcaaggaggaacttagattccctcgaggccagggcgttccaatcaacaccaatagtggtccagatgaccaaattggctactaccgaagagctacccgacgagttcgtggtggtgacggcaaaatgaaagagctcagccccagatggtacttctattacctaggaactggcccagaagcttcacttccctacggcgctaacaaagaaggcatcatatgggttgcaactgagggagccttgaatacacccaaagaccacattggcacccgcaatcctaataacaatgctgccaccgtgctacaacttcctcaaggaacaacattgccaaaaggcttctacgcagagggaagcagaggcggcagtcaagcctcttctcgctcctcatcacgtagtcgcggtaattcaagaaattcaactcctggcagcagtaggggaaattctcctgctcgaatggctagcggaggtggtgaaactgccctcgcgctattgctgctagacagattgaaccagcttgagagcaaagtttctggtaaaggccaacaacaacaaggccaaactgtcactaagaaatctgctgctgaggcatctaaaaagcctcgccaaaaacgtactgccacaaaacagtacaacgtcactcaagcatttgggagacgtggtccagaacaaacccaaggaaatttcggggaccaagacctaatcagacaaggaactgattacaaacattggccgcaaattgcacaatttgctccaagtgcctctgcattctttggaatgtcacgcattggcatggaagtcacaccttcgggaacatggctgacttatcatggagccattaaattggatgacaaagatccacaattcaaagacaacgtcatactgctgaacaagcacattgacgcatacaaaacattcccaccaacagagcctaaaaaggacaaaaagaaaaagactgatgaagctcagcctttgccgcagagacaaaagaagcagcccactgtgactcttcttcctgcggctgacatggatgatttctccagacaacttcaaaattccatgagtggagcttctgctgattcaactcaggcataaacactyatgatgaccacacaaggcagatgggctatgtaaacgttttcgcaattccgtttacgatacatagtctactcttgtgcagaatgaattctcgtaactaaacagcacaagtaggtttagttaactttaatctcacatagcaatctttaatcaatgtgtaacattagggaggacttgaaagagccaccacattttcatcgaggccacgcggagtacgatcgagggtacagtgaataatgctagggagagctgcctatatggaagagccctaatgtgtaaaattaattttagtagtgctatccccatgtgattttaatagcttcttaggagaatgacaa

SEQ ID NO: 29823 - DNA, 29729 bp, SARS Coronavirus; identical to SEQ ID NO: 29762

SEQ ID NO: 29824 - DNA, 29729 bp, SARS Coronavirus
atattaggtttttacctacccaggaaaagccaaccaacctcgatctcttgtagatctgttctctaaacgaactttaaaatctgtgtagctgtcgctcggctgcatgcctagtgcacctacgcagtataaacaataataaattttactgtcgttgacaagaaacgagtaactcgtccctcttctgcagactgcttacggtttcgtccgtgttgcagtcgatcatcagcatacctaggtttcgtccgggtgtgaccgaaaggtaagatggagagccttgttcttggtgtcaacgagaaaacacacgtccaactcagtttgcctgtccttcaggttagagacgtgctagtgcgtggcttcggggactctgtggaagaggccctatcggaggcacgtgaacacctcaaaaatggcacttgtggtctagtagagctggaaaaaggcgtactgccccagcttgaacagccctatgtgttcattaaacgttctgatgccttaagcaccaatcacggccacaaggtcgttgagctggttgcagaaatggacggcattcagtacggtcgtagcggtataacactgggagtactcgtgccacatgtgggcgaaaccccaattgcataccgcaatgttcttcttcgtaagaacggtaataagggagccggtggtcatagctatggcatcgatctaaagtcttatgacttaggtgacgagcttggcactgatcccattgaagattatgaacaaaactggaacactaagcatggcagtggtgcactccgtgaactcactcgtgagctcaatggaggtgcagtcactcgctatgtcgacaacaatttctgtggcccagatgggtaccctcttgattgcatcaaagattttctcgcacgcgcgggcaagtcaatgtgcactctttccgaacaacttgattacatcgagtcgaagagaggtgtctactgctgccgtgaccatgagcatgaaattgcctggttcactgagcgctctgataagmgctacgagcaccagacacccttcgaaattaagagtgccaagaaatttgacactttcaaaggggaatgcccaaagtttgtgtttcctcttaactcaaaagtcaaagtcattcaaccacgtgttgaaaagaaaaagactgagggtttcatggggcgtatacgctctgtgtaccctgttgcatctccacaggagtgtaacaatatgcacttgtctaccttgatgaaatgtaatcattgcgatgaagtttcatggcagacgtgcgactttctgaaagccacttgtgaacattgtggcactgaaaatttagttattgaaggacctactacatgtgggtacctacctactaatgctgtagtgaaaatgccatgtcctgcctgtcaagacccagagattggacctgagcatagtgttgcagattatcacaaccactcaaacattgaaactcgactccgcaagggaggtaggactagatgttttggaggctgtgtgtttgcctatgttggctgctataataagcgtgcctactgggttcctcgtgctagtgctgatattggctcaggccatactggcattactggtgacaatgtggagaccttgaatgaggatctccttgagatactgagtcgtgaacgtgttaacattaacattgttggcgattttcatttgaatgaagaggttgccatcattttggcatctttctctgcttctacaagtgcctttattgacactataaagagtcttgattacaagtctttcaaaaccattgttgagtcctgcggtaactataaagttaccaagggaaagcccgtaaaaggtgcttggaacattggacaacagagatcagttttaacaccactgtgtggttttccctcacaggctgctggtgttatcagatcaatttttgcgcgcacacttgatgcagcaaaccactcaattcctgatttgcaaagagcagctgtcaccatacttgatggtatttctgaacagtcattacgtcttgtcgacgccatggtttatacttcagacctgctcaccaacagtgtcattattatggcatatgtaactggtggtcttgtacaacagacttctcagtggttgtctaatcttttgggcactactgttgaaaaactcaggcctatctttgaatggattgaggcgaaacttagtgcaggagttgaatttctcaaggatgcttgggagattctcaaatttctcattacaggtgtttttgacatcgtcaagggtcaaatacaggttgcttcagataacatcaaggattgtgtaaaatgcttcattgatgttgttaacaaggcactcgaaatgtgcattgatcaagtcactatcgctggcgcaaagttgcgatcactcaacttaggtgaagtcttcatcgctcaaagcaagggactttaccgtcagtgtatacgtggcaaggagcagctgcaactactcatgcctcttaaggcaccaaaagaagtaacctttcttgaaggtgattcacatgacacagtacttacctctgaggaggttgttctcaagaacggtgaactcgaagcactcgagacgcccgttgatagcttcacaaatggagctatcgttggcacaccagtctgtgtaaatggcctcatgctcttagagattaaggacaaagaacaatactgcgcattgtctcctggtttactggctacaaacaatgtctttcgcttaaaagggggtgcaccaattaaaggtgtaacctttggagaagatactgtttgggaagttcaaggttacaagaatgtgagaatcacatttgagcttgatgaacgtgttgacaaagtgcttaatgaaaagtgctctgtctacactgttgaatccggtaccgaagttactgagtttgcatgtgttgtagcagaggctgttgtgaagactttacaaccagtttctgatctccttaccaacatgggtattgatcttgatgagtggagtgtagctacattctacttatttgatgatgctggtgaagaaaacttttcatcacgtatgtattgttccttttaccctccagatgaggaagaagaggacgatgcagagtgtgaggaagaagaaattgatgaaacctgtgaacatgagtacggtacagaggatgattatcaaggtctccctctggaatttggtgcctcggctgaaacagttcgagttgaggaagaagaagaggaagactggctggatgatactactgagcaatcagagattgagccagaaccagaacctacacctgaagaaccagttaatcagtttactggttatttaaaacttactgacaatgttgccattaaatgtgttgacatcgttaaggaggcacaaagtgctaatcctatggtgattgtaaatgctgctaacatacacctgaaacatggtggtggtgtagcaggtgcactcaacaaggcaaccaatggtgccatgcaaaaggagagtgatgattacattaagctaaatggccctcttacagtaggagggtcttgtttgctttctggacataatcttgctaagaagtgtctgcatgttgttggacctaacctaaatgcaggtgaggacatccagcttcttaaggcagcatatgaaaatttcaattcacaggacatcttacttgcaccattgttgtcagcaggcatatttggtgctaaaccacttcagtctttacaagtgtgcgtgcagacggttcgtacacaggtttatattgcagtcaatgacaaagctctttatgagcaggttgtcatggattatcttgataacctgaagcctagagtggaagcacctaaacaagaggagccaccaaacacagaagattccaaaactgaggagaaatctgtcgtacagaagcctgtcgatgtgaagccaaaaattaaggcctgcattgatgaggttaccacaacactggaagaaactaagtttcttaccaataagttactcttgtttgctgatatcaatggtaagctttaccatgattctcagaacatgcttagaggtgaagatatgtctttccttgagaaggatgcaccttacatggtaggtgatgttatcactagtggtgatatcacttgtgttgtaataccctccaaaaaggctggtggcactactgagatgctctcaagagctttgaagaaagtgccagttgatgagtatataaccacgtaccctggacaaggatgtgctggttatacacttgaggaagctaagactgctcttaagaaatgcaaatctgcattttatgtactaccttcagaagcacctaatgctaaggaagagattctaggaactgtatcctggaatttgagagaaatgcttgctcatgctgaagagacaagaaaattaatgcctatatgcatggatgttagagccataatggcaaccatccaacgtaagtataaaggaattaaaattcaagagggcatcgttgactatggtgtccgattcttcttttatactagtaaagagcctgtagcttctattattacgaagctgaactctctaaatgagccgcttgtcacaatgccaattggttatgtgacacatggttttaatcttgaagaggctgcgcgctgtatgcgttctcttaaagctcctgccgtagtgtcagtatcatcaccagatgctgttactacatataatggatacctcacttcgtcatcaaagacatctgaggagcactttgtagaaacagtttctttggctggctcttacagagattggtcctattcaggacagcgtacagagttaggtgttgaatttcttaagcgtggtgacaaaattgtgtaccacactctggagagccccgtcgagtttcatcttgacggtgaggttctttcacttgacaaactaaagagtctcttatccctgcgggaggttaagactataaaagtgttcacaactgtggacaacactaatctccacacacagcttgtggatatgtctatgacatatggacagcagtttggtccaacatacttggatggtgctgatgttacaaaaattaaacctcatgtaaatcatgagggtaagactttctttgtactacctagtgatgacacactacgtagtgaagctttcgagtactaccatactcttgatgagagttttcttggtaggtacatgtctgctttaaaccacacaaagaaatggaaatttcctcaagttggtggtttaacttcaattaaatgggctgataacaattgttatttgtctagtgttttattagcacttcaacagcttgaagtcaaattcaatgcaccagcacttcaagaggcttattatagagcccgtgctggtgatgctgctaacttttgtgcactcatactcgcttacagtaataaaactgttggcgagcttggtgatgtcagagaaactatgacccatcttctacagcatgctaatttggaatctgcaaagcgagttcttaatgtggtgtgtaaacattgtggtcagaaaactactaccttaacgggtgtagaagctgtgatgtatatgggtactctatcttatgataatcttaagacaggtgtttccattccatgtgtgtgtggtcgtgatgctacacaatatctagtacaacaagagtcttcttttgttatgatgtctgcaccacctgctgagtataaattacagcaaggtacattcttatgtgcgaatgagtacactggtaactatcagtgtggtcattacactcatataactgctaaggagaccctctatcgtattgacggagctcaccttacaaagatgtcagagtacaaaggaccagtgactgatgttttctacaaggaaacatcttacactacaaccatcaagcctgtgtcgtataaactcgatggagttacttacacagagattgaaccaaaattggatgggtattataaaaaggataatgcttactatacagagcagcctatagaccttgtaccaactcaaccattaccaaatgcgagttttgataatttcaaactcacatgttctaacacaaaatttgctgatgatttaaatcaaatgacaggcttcacaaagccagcttcacgagagctatctgtcacattcttcccagacttgaatggcgatgtagtggctattgactatagacactattcagcgagtttcaagaaaggtgctaaattactgcataagccaattgtttggcacattaaccaggctacaaccaagacaacgttcaaaccaaacacttggtgtttacgttgtctttggagtacaaagccagtagatacttcaaattcatttgaagttctggcagtagaagacacacaaggaatggacaatcttgcttgtgaaagtcaacaacccacctctgaagaagtagtggaaaatcctaccatacagaaggaagtcatagagtgtgacgtgaaaactaccgaagttgtaggcaatgtcatacttaaaccatcagatgaaggtgttaaagtaacacaagagttaggtcatgaggatcttatggctgcttatgtggaaaacacaagcattaccattaagaaacctaatgagctttcactagccttaggtttaaaaacaattgccactcatggtattgctgcaattaatagtgttccttggagtaaaattttggcttatgtcaaaccattcttaggacaagcagcaattacaacatcaaattgcgctaagagattagcacaacgtgtgtttaacaattatatgccttatgtgtttacattattgttccaattgtgtacttttactaaaagtaccaattctagaattagagcttcactacctacaactattgctaaaaatagtgttaagagtgttgctaaattatgtttggatgccggcattaattatgtgaagtcacccaaattttctaaattgttcacaatcgctatgtggctattgttgttaagtatttgcttaggttctctaatctgtgtaactgctgcttttggtgtactcttatctaattttggtgctccttcttattgtaatggcgttagagaattgtatcttaattcgtctaacgttactactatggatttctgtgaaggttcttttccttgcagcatttgtttaagtggattagactcccttgattcttatccagctcttgaaaccattcaggtgacgatttcatcgtacaagctagacttgacaattttaggtctggccgctgagtgggttttggcatatatgttgttcacaaaattcttttatttattaggtctttcagctataatgcaggtgttctttggctattttgctagtcatttcatcagcaattcttggctcatgtggtttatcattagtattgtacaaatggcacccgtttctgcaatggttaggatgtacatcttctttgcttctttctactacatatggaagagctatgttcatatcatggatggttgcacctcttcgacttgcatgatgtgctataagcgcaatcgtgccacacgcgttgagtgtacaactattgttaatggcatgaagagatctttctatgtctatgcaaatggaggccgtggcttctgcaagactcacaattggaattgtctcaattgtgacacattttgcactggtagtacattcattagtgatgaagttgctcgtgatttgtcactccagtttaaaagaccaatcaaccctactgaccagtcatcgtatattgttgatagtgttgctgtgaaaaatggcgcgcttcacctctactttgacaaggctggtcaaaagacctatgagagacatccgctctcccattttgtcaatttagacaatttgagagctaacaacactaaaggttcactgcctattaatgtcatagtttttgatggcaagtccaaatgcgacgagtctgcttctaagtctgcttctgtgtactacagtcagctgatgtgccaacctattctgttgcttgaccaagctcttgtatcagacgttggagatagtactgaagtttccgttaagatgtttgatgcttatgtcgacaccttttcagcaacttttagtgttcctatggaaaaacttaaggcacttgttgctacagctcacagcgagttagcaaagggtgtagctttagatggtgtcctttctacattcgtgtcagctgcccgacaaggtgttgttgataccgatgttgacacaaaggatgttattgaatgtctcaaactttcacatcactctgacttagaagtgacaggtgacagttgtaacaatttcatgctcacctataataaggttgaaaacatgacgcccagagatcttggcgcatgtattgactgtaatgcaaggcatatcaatgcccaagtagcaaaaagtcacaatgtttcactcatctggaatgtaaaagactacatgtctttatctgaacagctgcgtaaacaaattcgtagtgctgccaagaagaacaacataccttttagactaacttgtgctacaactagacaggttgtcaatgtcataactactaaaatctcactcaagggtggtaagattgttagtacttgttttaaacttatgcttaaggccacattattgtgcgttcttgctgcattggtttgttatatcgttatgccagtacatacattgtcaatccatgatggttacacaaatgaaatcattggttacaaagccattcaggatggtgtcactcgtgacatcatttctactgatgattgttttgcaaataaacatgctggttttgacgcatggtttagccagcgtggtggttcatacaaaaatgacaaaagctgccctgtagtagctgctatcattacaagagagattggtttcatagtgcctggcttaccgggtactgtgctgagagcaatcaatggtgacttcttgcattttctacctcgtgtttttagtgctgttggcaacatttgctacacaccttccaaactcattgagtatagtgattttgctacctctgcttgcgttcttgctgctgagtgtacaatttttaaggatgctatgggcaaacctgtgccatattgttatgacactaatttgctagagggttctatttcttatagtgagcttcgtccagacactcgttatgtgcttatggatggttccatcatacagtttcctaacacttacctggagggttctgttagagtagtaacaacttttgatgctgagtactgtagacatggtacatgcgaaaggtcagaagtaggtatttgcctatctaccagtggtagatgggttcttaataatgagcattacagagctctatcaggagttttctgtggtgttgatgcgatgaatctcatagctaacatctttactcctcttgtgcaacctgtgggtgctttagatgtgtctgcttcagtagtggctggtggtattattgccatattggtgacttgtgctgcctactactttatgaaattcagacgtgtttttggtgagtacaaccatgttgttgctgctaatgcacttttgtttttgatgtctttcactatactctgtctggtaccagcttacagctttctgccgggagtctactcagtcttttacttgtacttgacattctatttcaccaatgatgtttcattcttggctcaccttcaatggtttgccatgttttctcctattgtgcctttttggataacagcaatctatgtattctgtatttctctgaagcactgccattggttctttaacaactatcttaggaaaagagtcatgtttaatggagttacatttagtaccttcgaggaggctgctttgtgtacctttttgctcaacaaggaaatgtacctaaaattgcgtagcgagacactgttgccacttacacagtataacaggtatcttgctctatataacaagtacaagtatttcagtggagccttagatactaccagctatcgtgaagcagcttgctgccacttagcaaaggctctaaatgactttagcaactcaggtgctgatgttctctaccaaccaccacagacatcaatcacttctgctgttctgcagagtggttttaggaaaatggcattcccgtcaggcaaagttgaagggtgcatggtacaagtaacctgtggaactacaactcttaatggattgtggttggatgacacagtatactgtccaagacatgtcatttgcacagcagaagacatgcttaatcctaactatgaagatctgctcattcgcaaatccaaccatagctttcttgttcaggctggcaatgttcaacttcgtgttattggccattctatgcaaaattgtctgcttaggcttaaagttgatacttctaaccctaagacacccaagtataaatttgtccgtatccaacctggtcaaacattttcagttctagcatgctacaatggttcaccatctggtgtttatcagtgtgccatgagacctaatcataccattaaaggttctttccttaatggatcatgtggtagtgttggttttaacattgattatgattgcgtgtctttctgctatatgcatcatatggagcttccaacaggagtacacgctggtactgacttagaaggtaaattctatggtccatttgttgacagacaaactgcacaggctgcaggtacagacacaaccataacattaaatgttttggcatggctgtatgctgctgttatcaatggtgataggtggtttcttaatagattcaccactactttgaatgactttaaccttgtggcaatgaagtacaactatgaacctttgacacaagatcatgttgacatattgggacctctttctgctcaaacaggaattgccgtcttagatatgtgtgctgctttgaaagagctgctgcagaatggtatgaatggtcgtactatccttggtagcactattttagaagatgagtttacaccatttgatgttgttagacaatgctctggtgttaccttccaaggtaagttcaagaaaattgttaagggcactcatcattggatgcttttaactttcttgacatcactattgattcttgttcaaagtacacagtggtcactgtttttctttgtttacgagaatgctttcttgccatttactcttggtattatggcaattgctgcatgtgctatgctgcttgttaagcataagcacgcattcttgtgcttgtttctgttaccttctcttgcaacagttgcttactttaatatggtctacatgcctgctagctgggtgatgcgtatcatgacatggcttgaattggctgacactagcttgtctggttataggcttaaggattgtgttatgtatgcttcagctttagttttgcttattctcatgacagctcgcactgtttatgatgatgctgctagacgtgtttggacactgatgaatgtcattacacttgtttacaaagtctactatggtaatgctttagatcaagctatttccatgtgggccttagttatttctgtaacctctaactattctggtgtcgttacgactatcatgtttttagctagagctatagtgtttgtgtgtgttgagtattacccattgttatttattactggcaacaccttacagtgtatcatgcttgtttattgtttcttaggctattgttgctgctgctactttggccttttctgtttactcaaccgttacttcaggcttactcttggtgtttatgactacttggtctctacacaagaatttaggtatatgaactcccaggggcttttgcctcctaagagtagtattgatgctttcaagcttaacattaagttgttgggtattggaggtaaaccatgtatcaaggttgctactgtacagtctaaaatgtctgacgtaaagtgcacatctgtggtactgctctcggttcttcaacaacttagagtagagtcatcttctaaattgtgggcacaatgtgtacaactccacaatgatattcttcttgcaaaagacacaactgaagctttcgagaagatggtttctcttttgtctgttttgctatccatgcagggtgctgtagacattaataggttgtgcgaggaaatgctcgataaccgtgctactcttcaggctattgcttcagaatttagttctttaccatcatatgccgcttatgccactgcccaggaggcctatgagcaggctgtagctaatggtgattctgaagtcgttctcaaaaagttaaagaaatctttgaatgtggctaaatctgagtttgaccgtgatgctgccatgcaacgcaagttggaaaagatggcagatcaggctatgacccaaatgtacaaacaggcaagatctgaggacaagagggcaaaagtaactagtgctatgcaaacaatgctcttcactatgcttaggaagcttgataatgatgcacttaacaacattatcaacaatgcgcgtgatggttgtgttccactcaacatcataccattgactacagcagccaaactcatggttgttgtccctgattatggtacctacaagaacacttgtgatggtaacacctttacatatgcatctgcactctgggaaatccagcaagttgttgatgcggatagcaagattgttcaacttagtgaaattaacatggacaattcaccaaatttggcttggcctcttattgttacagctctaagagccaactcagctgttaaactacagaataatgaactgagtccagtagcactacgacagatgtcctgtgcggctggtaccacacaaacagcttgtactgatgacaatgcacttgcctactataacaattcgaagggaggtaggtttgtgctggcattactatcagaccaccaagatctcaaatgggctagattccctaagagtgatggtacaggtacaatttacacagaactggaaccaccttgtaggtttgttacagacacaccaaaagggcctaaagtgaaatacttgtacttcatcaaaggcttaaacaacctaaatagaggtatggtgctgggcagtttagctgctacagtacgtcttcaggctggaaatgctacagaagtacctgccaattcaactgtgctttccttctgtgcttttgcagtagaccctgctaaagcatataaggattacctagcaagtggaggacaaccaatcaccaactgtgtgaagatgttgtgtacacacactggtacaggacaggcaattactgtaacaccagaagctaacatggaccaagagtcctttggtggtgcttcatgttgtctgtattgtagatgccacattgaccatccaaatcctaaaggattctgtgacttgaaaggtaagtacgtccaaatacctaccacttgtgctaatgacccagtgggttttacacttagaaacacagtctgtaccgtctgcggaatgtggaaaggttatggctgtagttgtgaccaactccgcgaacccttgatgcagtctgcggatgcatcaacgtttttaaacgggtttgcggtgtaagtgcagcccgtcttacaccgtgcggcacaggcactagtactgatgtcgtctacagggcttttgatatttacaacgaaaaagttgctggttttgcaaagttcctaaaaactaattgctgtcgcttccaggagaaggatgaggaaggcaatttattagactcttactttgtagttaagaggcatactatgtctaactaccaacatgaagagactatttataacttggttaaagattgtccagcggttgctgtccatgactttttcaagtttagagtagatggtgacatggtaccacatatatcacgtcagcgtctaactaaatacacaatggctgatttagtctatgctctacgtcattttgatgagggtaattgtgatacattaaaagaaatactcgtcacatacaattgctgtgatgatgattatttcaataagaaggattggtatgacttcgtagagaatcctgacatcttacgcgtatatgctaacttaggtgagcgtgtacgccaatcattattaaagactgtacaattctgcgatgctatgcgtgatgcaggcattgtaggcgtactgacattagataatcaggatcttaatgggaactggtacgatttcggtgatttcgtacaagtagcaccaggctgcggagttcctattgtggattcatattactcattgctgatgcccatcctcactttgactagggcattggctgctgagtcccatatggatgctgatctcgcaaaaccacttattaagtgggatttgctgaaatatgattttacggaagagagactttgtctcttcgaccgttattttaaatattgggaccagacataccatcccaattgtattaactgtttggatgataggtgtatccttcattgtgcaaactttaatgtgttattttctactgtgtttccacctacaagttttggaccactagtaagaaaaatatttgtagatggtgttccttttgttgtttcaactggataccattttcgtgagttaggagtcgtacataatcaggatgtaaacttacatagctcgcgtctcagtttcaaggaacttttagtgtatgctgctgatccagctatgcatgcagcttctggcaatttattgctagataaacgcactacatgcttttcagtagctgcactaacaaacaatgttgcttttcaaactgtcaaacccggtaattttaataaagacttttatgactttgctgtgtctaaaggtttctttaaggaaggaagttctgttgaactaaaacacttcttctttgctcaggatggcaacgctgctatcagtgattatgactattatcgttataatctgccaacaatgtgtgatatcagacaactcctattcgtagttgaagttgttgataaatactttgattgttacgatggtggctgtattaatgccaaccaagtaatcgttaacaatctggataaatcagctggtttcccatttaataaatggggtaaggctagactttattatgactcaatgagttatgaggatcaagatgcacttttcgcgtatactaagcgtaatgtcatccctactataactcaaatgaatcttaagtatgccattagtgcaaagaatagagctcgcaccgtagctggtgtctctatctgtagtactatgacaaatagacagtttcatcagaaattattgaagtcaatagccgccactagaggagctactgtggtaattggaacaagcaagttttacggtggctggcataatatgttaaaaactgtttacagtgatgtagaaactccacaccttatgggttgggattatccaaaatgtgacagagccatgcctaacatgcttaggataatggcctctcttgttcttgctcgcaaacataacacttgctgtaacttatcacaccgtttctacaggttagctaacgagtgtgcgcaagtattaagtgagatggtcatgtgtggcggctcactatatgttaaaccaggtggaacatcatccggtgatgctacaactgcttatgctaatagtgtctttaacatttgtcaagctgttacagccaatgtaaatgcacttctttcaactgatggtaataagatagctgacaagtatgtccgcaatctacaacacaggctctatgagtgtctctatagaaatagggatgttgatcatgaattcgtggatgagttttacgcttacctgcgtaaacatttctccatgatgattctttctgatgatgccgttgtgtgctataacagtaactatgcggctcaaggtttagtagctagcattaagaactttaaggcagttctttattatcaaaataatgtgttcatgtctgaggcaaaatgttggactgagactgaccttactaaaggacctcacgaattttgctcacagcatacaatgctagttaaacaaggagatgattacgtgtacctgccttacccagatccatcaagaatattaggcgcaggctgttttgtcgatgatattgtcaaaacagatggtacacttatgattgaaaggttcgtgtcactggctattgatgcttacccacttacaaaacatcctaatcaggagtatgctgatgtctttcacttgtatttacaatacattagaaagttacatgatgagcttactggccacatgttggacatgtattccgtaatgctaactaatgataacacctcacggtactgggaacctgagttttatgaggctatgtacacaccacatacagtcttgcaggctgtaggtgcttgtgtattgtgcaattcacagacttcacttcgttgcggtgcctgtattaggagaccattcctatgttgcaagtgctgctatgaccatgtcatttcaacatcacacaaattagtgttgtctgttaatccctatgtttgcaatgccccaggttgtgatgtcactgatgtgacacaactgtatctaggaggtatgagctattattgcaagtcacataagcctcccattagttttccattatgtgctaatggtcaggtttttggtttatacaaaaacacatgtgtaggcagtgacaatgtcactgacttcaatgcgatagcaacatgtgattggactaatgctggcgattacatacttgccaacacttgtactgagagactcaagcttttcgcagcagaaacgctcaaagccactgaggaaacatttaagctgtcatatggtattgccactgtacgcgaagtactctctgacagagaattgcatctttcatgggaggttggaaaacctagaccaccattgaacagaaactatgtctttactggttaccgtgtaactaaaaatagtaaagtacagattggagagtacacctttgaaaaaggtgactatggtgatgctgttgtgtacagaggtactacgacatacaagttgaatgttggtgattactttgtgttgacatctcacactgtaatgccacttagtgcacctactctagtgccacaagagcactatgtgagaattactggcttgtacccaacactcaacatctcagatgagttttctagcaatgttgcaaattatcaaaaggtcggcatgcaaaagtactctacactccaaggaccacctggtactggtaagagtcattttgccatcggacttgctctctattacccatctgctcgcatagtgtatacggcatgctctcatgcagctgttgatgccctatgtgaaaaggcattaaaatatttgcccatagataaatgtagtagaatcatacctgcgcgtgcgcgcgtagagtgttttgataaattcaaagtgaattcaacactagaacagtatgttttctgcactgtaaatgcattgccagaaacaactgctgacattgtagtctttgatgaaatctctatggctactaattatgacttgagtgttgtcaatgctagacttcgtgcaaaacactacgtctatattggcgatcctgctcaattaccagccccccgcacattgctgactaaaggcacactagaaccagaatattttaattcagtgtgcagacttatgaaaacaataggtccagacatgttccttggaacttgtcgccgttgtcctgctgaaattgttgacactgtgagtgctttagtttatgacaataagctaaaagcacacaaggataagtcagctcaatgcttcaaaatgttctacaaaggtgttattacacatgatgtttcatctgcaatcaacagacctcaaataggcgttgtaagagaatttcttacacgcaatcctgcttggagaaaagctgtttttatctcaccttataattcacagaacgctgtagcttcaaaaatcttaggattgcctacgcagactgttgattcatcacagggttctgaatatgactatgtcatattcacacaaactactgaaacagcacactcttgtaatgtcaaccgcttcaatgtggctatcacaagggcaaaaattggcattttgtgcataatgtctgatagagatctttatgacaaactgcaatttacaagtctagaaataccacgtcgcaatgtggctacattacaagcagaaaatgtaactggactttttaaggactgtagtaagatcattactggtcttcatcctacacaggcacctacacacctcagcgttgatataaagttcaagactgaaggattatgtgttgacataccaggcataccaaaggacatgacctaccgtagactcatctctatgatgggtttcaaaatgaattaccaagtcaatggttaccctaatatgtttatcacccgcgaagaagctattcgtcacgttcgtgcgtggattggctttgatgtagagggctgtcatgcaactagagatgctgtgggtactaacctacctctccagctaggattttctacaggtgttaacttagtagctgtaccgactggttatgttgacactgaaaataacacagaattcaccagagttaatgcaaaacctccaccaggtgaccagtttaaacatcttataccactcatgtataaaggcttgccctggaatgtagtgcgtattaagatagtacaaatgctcagtgatacactgaaaggattgtcagacagagtcgtgttcgtcctttgggcgcatggctttgagcttacatcaatgaagtactttgtcaagattggacctgaaagaacgtgttgtctgtgtgacaaacgtgcaacttgcttttctacttcatcagatacttatgcctgctggaatcattctgtgggttttgactatgtctataacccatttatgattgatgttcagcagtggggctttacgggtaaccttcagagtaaccatgaccaacattgccaggtacatggaaatgcacatgtggctagttgtgatgctatcatgactagatgtttagcagtccatgagtgctttgttaagcgcgttgattggtctgttgaataccctattataggagatgaactgagggttaattctgcttgcagaaaagtacaacacatggttgtgaagtctgcattgcttgctgataagtttccagttcttcatgacattggaaatccaaaggctatcaagtgtgtgcctcaggctgaagtagaatggaagttctacgatgctcagccatgtagtgacaaagcttacaaaatagaggaactcttctattcttatgctacacatcacgataaattcactgatggtgtttgtttgttttggaattgtaacgttgatcgttacccagccaatgcaattgtgtgtaggtttgacacaagagtcttgtcaaacttgaacttaccaggctgtgatggtggtagtttgtatgtgaataagcatgcattccacactccagctttcgataaaagtgcatttactaatttaaagcaattgcctttcttttactattctgatagtccttgtgagtctcatggcaaacaagtagtgtcggatattgattatgttccactcaaatctgctacgtgtattacacgatgcaatttaggtggtgctgtttgcagacaccatgcaaatgagtaccgacagtacttggatgcatataatatgatgatttctgctggatttagcctatggatttacaaacaatttgatacttataacctgtggaatacatttaccaggttacagagtttagaaaatgtggcttataatgttgttaataaaggacactttgatggacacgccggcgaagcacctgtttccatcattaataatgctgtttacacaaaggtagatggtattgatgtggagatctttgaaaataagacaacacttcctgttaatgttgcatttgagctttgggctaagcgtaacattaaaccagtgccagagattaagatactcaataatttgggtgttgatatcgctgctaatactgtaatctgggactacaaaagagaagccccagcacatgtatctacaataggtgtctgcacaatgactgacattgccaagaaacctactgagagtgcttgttcttcacttactgtcttgtttgatggtagagtggaaggacaggtagacctttttagaaacgcccgtaatggtgttttaataacagaaggttcagtcaaaggtctaacaccttcaaagggaccagcacaagctagcgtcaatggagtcacattaattggagaatcagtaaaaacacagtttaactactttaagaaagtagacggcattattcaacagttgcctgaaacctactttactcagagcagagacttagaggattttaagcccagatcacaaatggaaactgactttctcgagctcgctatggatgaattcatacagcgatataagctcgagggctatgccttcgaacacatcgtttatggagatttcagtcatggacaacttggcggtcttcatttaatgataggcttagccaagcgctcacaagattcaccacttaaattagaggattttatccctatggacagcacagtgaaaaattacttcataacagatgcgcaaacaggttcatcaaaatgtgtgtgttctgtgattgatcttttacttgatgactttgtcgagataataaagtcacaagatttgtcagtgatttcaaaagtggtcaaggttacaattgactatgctgaaatttcattcatgctttggtgtaaggatggacatgttgaaaccttctacccaaaactacaagcaagtcaagcgtggcaaccaggtgttgcgatgcctaacttgtacaagatgcaaagaatgcttcttgaaaagtgtgaccttcagaattatggtgaaaatgctgttataccaaaaggaataatgatgaatgtcgcaaagtatactcaactgtgtcaatacttaaatacacttactttagctgtaccctacaacatgagagttattcactttggtgctggctctgataaaggagttgcaccaggtacagctgtgctcagacaatggttgccaactggcacactacttgtcgattcagatcttaatgacttcgtctccgacgcagattctactttaattggagactgtgcaacagtacatacggctaataaatgggaccttattattagcgatatgtatgaccctaggaccaaacatgtgacaaaagagaatgactctaaagaagggtttttcacttatctgtgtggatttataaagcaaaaactagccctgggtggttctatagctgtaaagataacagagcattcttggaatgctgacctttacaagcttatgggccatttctcatggtggacagcttttgttacaaatgtaaatgcatcatcatcggaagcatttttaattggggctaactatcttggcaagccgaaggaacaaattgatggctataccatgcatgctaactacattttctggaggaacacaaatcctatccagttgtcttcctattcactctttgacatgagcaaatttcctcttaaattaagaggaactgctgtaatgtctcttaaggagaatcaaatcaatgatatgatttattctcttctggaaaaaggtaggcttatcattagagaaaacaacagagttgtggtttcaagtgatattcttgttaacaactaaacgaacatgtttattttcttattatttcttactctcactagtggtagtgaccttgaccggtgcaccacttttgatgatgttcaagctcctaattacactcaacatacttcatctatgaggggggtttactatcctgatgaaatttttagatcagacactctttatttaactcaggatttatttcttccattttattctaatgttacagggtttcatactattaatcatacgtttggcaaccctgtcataccttttaaggatggtatttattttgctgccacagagaaatcaaatgttgtccgtggttgggtttttggttctaccatgaacaacaagtcacagtcggtgattattattaacaattctactaatgttgttatacgagcatgtaactttgaattgtgtgacaaccctttctttgctgtttctaaacccatgggtacacagacacatactatgatattcgataatgcatttaattgcactttcgagtacatatctgatgccttttcgcttgatgtttcagaaaagtcaggtaattttaaacacttacgagagtttgtgtttaaaaataaagatgggtttctctatgtttataagggctatcaacctatagatgtagttcgtgatctaccttctggttttaacactttgaaacctatttttaagttgcctcttggtattaacattacaaattttagagccattcttacagccttttcacctgctcaagacatttggggcacgtcagctgcagcctattttgttggctatttaaagccaactacatttatgctcaagtatgatgaaaatggtacaatcacagatgctgttgattgttctcaaaatccacttgctgaactcaaatgctctgttaagagctttgagattgacaaaggaatttaccagacctctaatttcagggttgttccctcaggagatgttgtgagattccctaatattacaaacttgtgtccttttggagaggtttttaatgctactaaattcccttctgtctatgcatgggagagaaaaaaaatttctaattgtgttgctgattactctgtgctctacaactcaacatttttttcaacctttaagtgctatggcgtttctgccactaagttgaatgatctttgcttctccaatgtctatgcagattcttttgtagtcaagggagatgatgtaagacaaatagcgccaggacaaactggtgttattgctgattataattataaattgccagatgatttcatgggttgtgtccttgcttggaatactaggaacattgatgctacttcaactggtaattataattataaatataggtatcttagacatggcaagcttaggccctttgagagagacatatctaatgtgcctttctcccctgatggcaaaccttgcaccccacctgctcttaattgttattggccattaaatgattatggtttttacaccactactggcattggctaccaaccttacagagttgtagtactttcttttgaacttttaaatgcaccggccacggtttgtggaccaaaattatccactgaccttattaagaaccagtgtgtcaattttaattttaatggactcactggtactggtgtgttaactccttcttcaaagagatttcaaccatttcaacaatttggccgtgatgtttctgatttcactgattccgttcgagatcctaaaacatctgaaatattagacatttcaccttgctcttttgggggtgtaagtgtaattacacctggaacaaatgcttcatctgaagttgctgttctatatcaagatgttaactgcactgatgtttctacagcaattcatgcagatcaactcacaccagcttggcgcatatattctactggaaacaatgtattccagactcaagcaggctgtcttataggagctgagcatgtcgacacttcttatgagtgcgacattcctattggagctggcatttgtgctagttaccatacagtttctttattacgtagtactagccaaaaatctattgtggcttatactatgtctttaggtgctgatagttcaattgcttactctaataacaccattgctatacctactaacttttcaattagcattactacagaagtaatgcctgtttctatggctaaaacctccgtagattgtaatatgtacatctgcggagattctactgaatgtgctaatttgcttctccaatatggtagcttttgcacacaactaaatcgtgcactctcaggtattgctgctgaacaggatcgcaacacacgtgaagtgttcgctcaagtcaaacaaatgtacaaaaccccaactttgaaatattttggtggttttaatttttcacaaatattacctgaccctctaaagccaactaagaggtcttttattgaggacttgctctttaataaggtgacactcgctgatgctggcttcatgaagcaatatggcgaatgcctaggtgatattaatgctagagatctcatttgtgcgcagaagttcaatggacttacagtgttgccacctctgctcactgatgatatgattgctgcctacactgctgctctagttagtggtactgccactgctggatggacatttggtgctggcgctgctcttcaaataccttttgctatgcaaatggcatataggttcaatggcattggagttacccaaaatgttctctatgagaaccaaaaacaaatcgccaaccaatttaacaaggcgattagtcaaattcaagaatcacttacaacaacatcaactgcattgggcaagctgcaagacgttgttaaccagaatgctcaagcattaaacacacttgttaaacaacttagctctaattttggtgcaatttcaagtgtgctaaatgatatcctttcgcgacttgataaagtcgaggcggaggtacaaattgacaggttaattacaggcagacttcaaagccttcaaacctatgtaacacaacaactaatcagggctgctgaaatcagggcttctgctaatcttgctgctactaaaatgtctgagtgtgttcttggacaatcaaaaagagttgacttttgtggaaagggctaccaccttatgtccttcccacaagcagccccgcatggtgttgtcttcctacatgtcacgtatgtgccatcccaggagaggaacttcaccacagcgccagcaatttgtcatgaaggcaaagcatacttccctcgtgaaggtgtttttgtgtttaatggcacttcttggtttattacacagaggaacttcttttctccacaaataattactacagacaatacatttgtctcaggaaattgtgatgtcgttattggcatcattaacaacacagtttatgatcctctgcaacctgagcttgactcattcaaagaagagctggacaagtacttcaaaaatcatacatcaccagatgttgatcttggcgacatttcaggcattaacgcttctgtcgtcaacattcaaaaagaaattgaccgcctcaatgaggtcgctaaaaatttaaatgaatcactcattgaccttcaagaattgggaaaatatgagcaatatattaaatggccttggtatgtttggctcggcttcattgctggactaattgccatcgtcatggttacaatcttgctttgttgcatgactagttgttgcagttgcctcaagggtgcatgctcttgtggttcttgctgcaagtttgatgaggatgactctgagccagttctcaagggtgtcaaattacattacacataaacgaacttatggatttgtttatgagattttttactcttggatcaattactgcacagccagtaaaaattgacaatgcttctcytgcaagtactgttcatgctacagcaacgataccgctacaagcctcactccctttcggatggcttgttattggcgttgcatttcttgctgtttttcagagcgctaccaaaataattgcgctcaataaaagatggcagctagccctttataagggcttccagttcatttgcaatttactgctgctatttgttaccatctattcacatcttttgcttgtcgctgcaggtatggaggcgcaatttttgtacctctatgccttgatatattttctacaatgcatcaacgcatgtagaattattatgagatgttggctttgttggaagtgcaaatccaagaacccattactttatgatgccaactactttgtttgctggcacacacataactatgactactgtataccatataacagtgtcacagatacaattgtcgttactgaaggtgacggcatttcaacaccaaaactcaaagaagactaccaaattggtggttattctgaggataggcactcaggtgttaaagactatgtcgttgtacatggctatttcaccgaagtttactaccagcttgagtctacacaaattactacagacactggtattgaaaatgctacattcttcatctttaacaagcttgttaaagacccaccgaatgtgcaaatacacacaatcgacggctcttcaggagttgctaatccagcaatggatccaatttatgatgagccgacgacgactactagcgtgcctttgtaagcacaagaaagtgagtacgaacttatgtactcattcgtttcggaagaaacaggtacgttaatagttaatagcgtacttctttttcttgctttcgtggtattcttgctagtcacactagccatccttactgcgcttcgattgtgtgcgtactgctgcaatattgttaacgtgagtttagtaaaaccaacggtttacgtctactcgcgtgttaaaaatctgaactcttctgaaggagttcctgatcttctggtctaaacgaactaactattattattattctgtttggaactttaacattgcttatcatggcagacaacggtactattaccgttgaggagcttaaacaactcctggaacaatggaacctagtaataggtttcctattcctagcctggattatgttactacaatttgcctattctaatcggaacaggtttttgtacataataaagcttgttttcctctggctcttgtggccagtaacacttgcttgttttgtgcttgctgctgtctacagaattaattgggtgactggcgggattgcgattgcaatggcttgtattgtaggcttgatgtggcttagctacttcgttgcttccttcaggctgtttgctcgtacccgctcaatgtggtcattcaacccagaaacaaacattcttctcaatgtgcctctccgggggacaattgtgaccagaccgctcatggaaagtgaacttgtcattggtgctgtgatcattcgtggtcacttgcgaatggccggacactccctagggcgctgtgacattaaggacctgccaaaagagatcactgtggctacatcacgaacgctttcttattacaaattaggagcgtcgcagcgtgtaggcactgattcaggttttgctgcatacaaccgctaccgtattggaaactataaattaaatacagaccacgccggtagcaacgacaatattgctttgctagtacagtaagtgacaacagatgtttcatcttgttgatttccaggttacaatagcagagatattgattatcattatgaggactttcaggattgctatttggaatcttgacgttataataagttcaatagtgagacaattatttaagcctctaactaagaagaattattcggagttagatgatgaagaacctatggagttagattatccataaaacgaacatgaaaattattctcttcctgacattgattgtatttacatcttgcgagctatatcactatcaggagtgtgttagaggtacgactgtactactaaaagaaccttgcccatcaggaacatacgagggcaattcaccatttcaccctcttgctgacaataaatttgcactaacttgcactagcacacactttgcttttgcttgtgctgacggtactcgacatacctatcagctgcgtgcaagatcagtttcaccaaaacttttcatcagacaagaggaggttcaacaagagctctactcgccactttttctcattgttgctgctctagtatttttaatactttgcttcaccattaagagaaagacagaatgaatgagctcactttaattgacttctatttgtgctttttagcctttctgctattccttgttttaataatgcttattatattttggttttcactcgaaatccaggatctagaagaaccttgtaccaaagtctaaacgaacatgaaacttctcattgttttgacttgtatttctctatgcagttgcatatgcactgtagtacagcgctgtgcatctaataaacctcatgtgcttgaagatccttgtaaggtacaacactaggggtaatacttatagcactgcttggctttgtgctctaggaaaggttttaccttttcatagatggcacactatggttcaaacatgcacacctaatgttactatcaactgtcaagatccagctggtggtgcgcttatagctaggtgttggtaccttcatgaaggtcaccaaactgctgcatttagagacgtacttgttgttttaaataaacgaacaaattaaaatgtctgataatggaccccaatcaaaccaacgtagtgccccccgcattacatttggtggacccacagattcaactgacaataaccagaatggaggacgcaatggggcaaggccaaaacagcgccgaccccaaggtttacccaataatactgcgtcttggttcacagctctcactcagcatggcaaggaggaacttagattccctcgaggccagggcgttccaatcaacaccaatagtggtccagatgaccaaattggctactaccgaagagctacccgacgagttcgtggtggtgacggcaaaatgaaagagctcagccccagatggtacttctattacctaggaactggcccagaagcttcacttccctacggcgctaacaaagaaggcatcgtatgggttgcaactgagggagccttgaatacacccaaagaccacattggcacccgcaatcctaataacaatgctgccaccgtgctacaacttcctcaaggaacaacattgccaaaaggcttctacgcagagggaagcagaggcggcagtcaagcctcttctcgctcctcatcacgtagtcgcggtaattcaagaaattcaactcctggcagcagtaggggaaattctcctgctcgaatggctagcggaggtggtgaaactgccctcgcgctattgctgctagacagattgaaccagcttgagagcaaagtttctggtaaaggccaacaacaacaaggccaaactgtcactaagaaatctgctgctgaggcatctaaaaagcctcgccaaaaacgtactgccacaaaacagtacaacgtcactcaagcatttgggagacgtggtccagaacaaacccaaggaaatttcggggaccaagacctaatcagacaaggaactgattacaaacattggccgcaaattgcacaatttgctccaagtgcctctgcattctttggaatgtcacgcattggcatggaagtcacaccttcgggaacatggctgacttatcatggagccattaaattggatgacaaagatccacaattcaaagacaacgtcatactgctgaacaagcacattgacgcatacaaaacattcccaccaacagagcctaaaaaggacaaaaagaaaaagactgatgaagctcagcctttgccgcagagacaaaagaagcagcccactgtgactcttcttcctgcggctgacatggatgatttctccagacaacttcaaaattccatgagtggagcttctgctgattcaactcaggcataaacactcatgatgaccacacaaggcagatgggctatgtaaacgttttcgcaattccgtttacgatacatagtctactcttgtgcagaatgaattctcgtaactaaacagcacaagtaggtttagttaactttaatctcacatagcaatctttaatcaatgtgtaacattagggaggacttgaaagagccaccacattttcatcgaggccacgcggagtacgatcgagggtacagtgaataatgctagggagagctgcctatatggaagagccctaatgtgtaaaattaattttagtagtgctatccccatgtgattttaatagcttcttaggagaatgacaa

SEQ ID NO: 29825 - DNA, 29729 bp, SARS Coronavirus
atattaggtttttacctacccaggaaaagccaaccaacctcgatctcttgtagatctgttctctaaacgaactttaaaatctgtgtagctgtcgctcggctgcatgcctagtgcacctacgcagtataaacaataataaattttactgtcgttgacaagaaacgagtaactcgtccctcttctgcagactgcttacggtttcgtccgtgttgcagtcgatcatcagcatacctaggtttcgtccgggtgtgaccgaaaggtaagatggagagccttgttcttggtgtcaacgagaaaacacacgtccaactcagtttgcctgtccttcaggttagagacgtgctagtgcgtggcttcggggactctgtggaagaggccctatcggaggcacgtgaacacctcaaaaatggcacttgtggtctagtagagctggaaaaaggcgtactgccccagcttgaacagccctatgtgttcattaaacgttctgatgccttaagcaccaatcacggccacaaggtcgttgagctggttgcagaaatggacggcattcagtacggtcgtagcggtataacactgggagtactcgtgccacatgtgggcgaaaccccaattgcataccgcaatgttcttcttcgtaagaacggtaataagggagccggtggtcatagctatggcatcgatctaaagtcttatgacttaggtgacgagcttggcactgatcccattgaagattatgaacaaaactggaacactaagcatggcagtggtgcactccgtgaactcactcgtgagctcaatggaggtgcagtcactcgctatgtcgacaacaatttctgtggcccagatgggtaccctcttgattgcatcaaagattttctcgcacgcgcgggcaagtcaatgtgcactctttccgaacaacttgattacatcgagtcgaagagaggtgtctactgctgccgtgaccatgagcatgaaattgcctggttcactgagcgctctgataagagctacgagcaccagacacccttcgaaattaagagtgccaagaaatttgacactttcaaaggggaatgcccaaagtttgtgtttcctcttaactcaaaagtcaaagtcattcaaccacgtgttgaaaagaaaaagactgagggtttcatggggcgtatacgctctgtgtaccctgttgcatctccacaggagtgtaacaatatgcacttgtctaccttgatgaaatgtaatcattgcgatgaagtttcatggcagacgtgcgactttctgaaagccacttgtgaacattgtggcactgaaaatttagttattgaaggacctactacatgtgggtacctacctactaatgctgtagtgaaaatgccatgtcctgcctgtcaagacccagagattggacctgagcatagtgttgcagattatcacaaccactcaaacattgaaactcgactccgcaagggaggtaggactagatgttttggaggctgtgtgtttgcctatgttggctgctataataagcgtgcctactgggttcctcgtgctagtgctgatattggctcaggccatactggcattactggtgacaatgtggagaccttgaatgaggatctccttgagatactgagtcgtgaacgtgttaacattaacattgttggcgattttcatttgaatgaagaggttgccatcattttggcatctttctctgcttctacaagtgcctttattgacactataaagagtcttgattacaagtctttcaaaaccattgttgagtcctgcggtaactataaagttaccaagggaaagcccgtaaaaggtgcttggaacattggacaacagagatcagttttaacaccactgtgtggttttccctcacaggctgctggtgttatcagatcaatttttgcgcgcacacttgatgcagcaaaccactcaattcctgatttgcaaagagcagctgtcaccatacttgatggtatttctgaacagtcattacgtcttgtcgacgccatggtttatacttcagacctgctcaccaacagtgtcattattatggcatatgtaactggtggtcttgtacaacagacttctcagtggttgtctaatcttttgggcactactgttgaaaaactcaggcctatctttgaatggattgaggcgaaacttagtgcaggagttgaatttctcaaggatgcttgggagattctcaaatttctcattacaggtgtttttgacatcgtcaagggtcaaatacaggttgcttcagataacatcaaggattgtgtaaaatgcttcattgatgttgttaacaaggcactcgaaatgtgcattgatcaagtcactatcgctggcgcaaagttgcgatcactcaacttaggtgaagtcttcatcgctcaaagcaagggactttaccgtcagtgtatacgtggcaaggagcagctgcaactactcatgcctcttaaggcaccaaaagaagtaacctttcttgaaggtgattcacatgacacagtacttacctctgaggaggttgttctcaagaacggtgaactcgaagcactcgagacgcccgttgatagcttcacaaatggagctatcgttggcacaccagtctgtgtaaatggcctcatgctcttagagattaaggacaaagaacaatactgcgcattgtctcctggtttactggctacaaacaatgtctttcgcttaaaagggggtgcaccaattaaaggtgtaacctttggagaagatactgtttgggaagttcaaggttacaagaatgtgagaatcacatttgagcttgatgaacgtgttgacaaagtgcttaatgaaaagtgctctgtctacactgttgaatccggtaccgaagttactgagtttgcatgtgttgtagcagaggctgttgtgaagactttacaaccagtttctgatctccttaccaacatgggtattgatcttgatgagtggagtgtagctacattctacttatttgatgatgctggtgaagaaaacttttcatcacgtatgtattgttccttttaccctccagatgaggaagaagaggacgatgcagagtgtgaggaagaagaaattgatgaaacctgtgaacatgagtacggtacagaggatgattatcaaggtctccctctggaatttggtgcctcggctgaaacagttcgagttgaggaagaagaagaggaagactggctggatgatactactgagcaatcagagattgagccagaaccagaacctacacctgaagaaccagttaatcagtttactggttatttaaaacttactgacaatgttgccattaaatgtgttgacatcgttaaggaggcacaaagtgctaatcctatggtgattgtaaatgctgctaacatacacctgaaacatggtggtggtgtagcaggtgcactcaacaaggcaaccaatggtgccatgcaaaaggagagtgatgattacattaagctaaatggccctcttacagtaggagggtcttgtttgctttctggacataatcttgctaagaagtgtctgcatgttgttggacctaacctaaatgcaggtgaggacatccagcttcttaaggcagcatatgaaaatttcaattcacaggacatcttacttgcaccattgttgtcagcaggcatatttggtgctaaaccacttcagtctttacaagtgtgcgtgcagacggttcgtacacaggtttatattgcagtcaatgacaaagctctttatgagcaggttgtcatggattatcttgataacctgaagcctagagtggaagcacctaaacaagaggagccaccaaacacagaagattccaaaactgaggagaaatctgtcgtacagaagcctgtcgatgtgaagccaaaaattaaggcctgcattgatgaggttaccacaacactggaagaaactaagtttcttaccaataagttactcttgtttgctgatatcaatggtaagctttaccatgattctcagaacatgcttagaggtgaagatatgtctttccttgagaaggatgcaccttacatggtaggtgatgttatcactagtggtgatatcacttgtgttgtaataccctccaaaaaggctggtggcactactgagatgctctcaagagctttgaagaaagtgccagttgatgagtatataaccacgtaccctggacaaggatgtgctggttatacacttgaggaagctaagactgctcttaagaaatgcaaatctgcattttatgtactaccttcagaagcacctaatgctaaggaagagattctaggaactgtatcctggaatttgagagaaatgcttgctcatgctgaagagacaagaaaattaatgcctatatgcatggatgttagagccataatggcaaccatccaacgtaagtataaaggaattaaaattcaagagggcatcgttgactatggtgtccgattcttcttttatactagtaaagagcctgtagcttctattattacgaagctgaactctctaaatgagccgcttgtcacaatgccaattggttatgtgacacatggttttaatcttgaagaggctgcgcgctgtatgcgttctcttaaagctcctgccgtagtgtcagtatcatcaccagatgctgttactacatataatggatacctcacttcgtcatcaaagacatctgaggagcactttgtagaaacagtttctttggctggctcttacagagattggtcctattcaggacagcgtacagagttaggtgttgaatttcttaagcgtggtgacaaaattgtgtaccacactctggagagccccgtcgagtttcatcttgacggtgaggttctttcacttgacaaactaaagagtctcttatccctgcgggaggttaagactataaaagtgttcacaactgtggacaacactaatctccacacacagcttgtggatatgtctatgacatatggacagcagtttggtccaacatacttggatggtgctgatgttacaaaaattaaacctcatgtaaatcatgagggtaagactttctttgtactacctagtgatgacacactacgtagtgaagctttcgagtactaccatactcttgatgagagttttcttggtaggtacatgtctgctttaaaccacacaaagaaatggaaatttcctcaagttggtggtttaacttcaattaaatgggctgataacaattgttatttgtctagtgttttattagcacttcaacagcttgaagtcaaattcaatgcaccagcacttcaagaggcttattatagagcccgtgctggtgatgctgctaacttttgtgcactcatactcgcttacagtaataaaactgttggcgagcttggtgatgtcagagaaactatgacccatcttctacagcatgctaatttggaatctgcaaagcgagttcttaatgtggtgtgtaaacattgtggtcagaaaactactaccttaacgggtgtagaagctgtgatgtatatgggtactctatcttatgataatcttaagacaggtgtttccattccatgtgtgtgtggtcgtgatgcwacacaatatctagtacaacaagagtcttcttttgttatgatgtctgcaccacctgctgagtataaattacagcaaggtacattcttatgtgcgaatgagtacactggtaactatcagtgtggtcattacactcatataactgctaaggagaccctctatcgtattgacggagctcaccttacaaagatgtcagagtacaaaggaccagtgactgatgttttctacaaggaaacatcttacactacaaccatcaagcctgtgtcgtataaactcgatggagttacttacacagagattgaaccaaaattggatgggtattataaaaaggataatgcttactatacagagcagcctatagaccttgtaccaactcaaccattaccaaatgcgagttttgataatttcaaactcacatgttctaacacaaaatttgctgatgatttaaatcaaatgacaggcttcacaaagccagcttcacgagagctatctgtcacattcttcccagacttgaatggcgatgtagtggctattgactatagacactattcagcgagtttcaagaaaggtgctaaattactgcataagccaattgtttggcacattaaccaggctacaaccaagacaacgttcaaaccaaacacttggtgtttacgttgtctttggagtacaaagccagtagatacttcaaattcatttgaagttctggcagtagaagacacacaaggaatggacaatcttgcttgtgaaagtcaacaacccacctctgaagaagtagtggaaaatcctaccatacagaaggaagtcatagagtgtgacgtgaaaactaccgaarttgtaggcaatgtcatacttaaaccatcagatgaaggtgttaaagtaacacaagagttaggtcatgaggatcttatggctgcttatgtggaaaacacaagcattaccattaagaaacctaatgagctttcactagccttaggtttaaaaacaattgccactcatggtattgctgcaattaatagtgttccttggagtaaaattttggcttatgtcaaaccattcttaggacaagcagcaattacaacatcaaattgcgctaagagattagcacaacgtgtgtttaacaattatatgccttatgtgtttacattattgttccaattgtgtacttttactaaaagtaccaattctagaattagagcttcactacctacaactattgctaaaaatagtgttaagagtgttgctaaattatgtttggatgccggcattaattatgtgaagtcacccaaattttctaaattgttcacaatcgctatgtggctattgttgttaagtatttgcttaggttctctaatctgtgtaactgctgcttttggtgtactcttatctaattttggtgctccttcttattgtaatggcgttagagaattgtatcttaattcgtctaacgttactactatggatttctgtgaaggttcttttccttgcagcatttgtttaagtggattagactcccttgattcttatccagctcttgaaaccattcaggtgacgatttcatcgtacaagctagacttgacaattttaggtctggccgctgagtgggttttggcatatatgttgttcacaaaattcttttatttattaggtctttcagctataatgcaggtgttctttggctattttgctagtcatttcatcagcaattcttggctcatgtggtttatcattagtattgtacaaatggcacccgtttctgcaatggttaggatgtacatcttctttgcttctttctactacatatggaagagctatgttcatatcatggatggttgcacctcttcgacttgcatgatgtgctataagcgcaatcgtgccacacgcgttgagtgtacaactattgttaatggcatgaagagatctttctatgtctatgcaaatggaggccgtggcttctgcaagactcacaattggaattgtctcaattgtgacacattttgcactggtagtacattcattagtgatgaagttgctcgtgatttgtcactccagtttaaaagaccaatcaaccctactgaccagtcatcgtatattgttgatagtgttgctgtgaaaaatggcgcgcttcacctctactttgacaaggctggtcaaaagacctatgagagacatccgctctcccattttgtcaatttagacaatttgagagctaacaacactaaaggttcactgcctattaatgtcatagtttttgatggcaagtccaaatgcgacgagtctgcttctaagtctgcttctgtgtactacagtcagctgatgtgccaacctattctgttgcttgaccaagctcttgtatcagacgttggagatagtactgaagtttccgttaagatgtttgatgcttatgtcgacaccttttcagcaacttttagtgttcctatggaaaaacttaaggcacttgttgctacagctcacagcgagttagcaaagggtgtagctttagatggtgtcctttctacattcgtgtcagctgcccgacaaggtgttgttgataccgatgttgacacaaaggatgttattgaatgtctcaaactttcacatcactctgacttagaagtgacaggtgacagttgtaacaatttcatgctcacctataataaggttgaaaacatgacgcccagagatcttggcgcatgtattgactgtaatgcaaggcatatcaatgcccaagtagcaaaaagtcacaatgtttcactcatctggaatgtaaaagactacatgtctttatctgaacagctgcgtaaacaaattcgtagtgctgccaagaagaacaacataccttttagactaacttgtgctacaactagacaggttgtcaatgtcataactactaaaatctcactcaagggtggtaagattgttagtacttgttttaaacttatgcttaaggccacattattgtgcgttcttgctgcattggtttgttatatcgttatgccagtacatacattgtcaatccatgatggttacacaaatgaaatcattggttacaaagccattcaggatggtgtcactcgtgacatcatttctactgatgattgttttgcaaataaacatgctggttttgacgcatggtttagccagcgtggtggttcatacaaaaatgacaaaagctgccctgtagtagctgctatcattacaagagagattggtttcatagtgcctggcttaccgggtactgtgctgagagcaatcaatggtgacttcttgcattttctacctcgtgtttttagtgctgttggcaacatttgctacacaccttccaaactcattgagtatagtgattttgctacctctgcttgcgttcttgctgctgagtgtacaatttttaaggatgctatgggcaaacctgtgccatattgttatgacactaatttgctagagggttctatttcttatagtgagcttcgtccagacactcgttatgtgcttatggatggttccatcatacagtttcctaacacttacctggagggttctgttagagtagtaacaacttttgatgctgagtactgtagacatggtacatgcgaaaggtcagaagtaggtatttgcctatctaccagtggtagatgggttcttaataatgagcattacagagctctatcaggagttttctgtggtgttgatgcgatgaatctcatagctaacatctttactcctcttgtgcaacctgtgggtgctttagatgtgtctgcttcagtagtggctggtggtattattgccatattggtgacttgtgctgcctactactttatgaaattcagacgtgtttttggtgagtacaaccatgttgttgctgctaatgcacttttgtttttgatgtctttcactatactctgtctggtaccagcttacagctttctgccgggagtctactcagtcttttacttgtacttgacattctatttcaccaatgatgtttcattcttggctcaccttcaatggtttgccatgttttctcctattgtgcctttttggataacagcaatctatgtattctgtatttctctgaagcactgccattggttctttaacaactatcttaggaaaagagtcatgtttaatggagttacatttagtaccttcgaggaggctgctttgtgtacctttttgctcaacaaggaaatgtacctaaaattgcgtagcgagacactgttgccacttacacagtataacaggtatcttgctctatataacaagtacaagtatttcagtggagccttagatactaccagctatcgtgaagcagcttgctgccacttagcaaaggctctaaatgactttagcaactcaggtgctgatgttctctaccaaccaccacagacatcaatcacttctgctgttctgcagagtggttttaggaaaatggcattcccgtcaggcaaagttgaagggtgcatggtacaagtaacctgtggaactacaactcttaatggattgtggttggatgacacagtatactgtccaagacatgtcatttgcacagcagaagacatgcttaatcctaactatgaagatctgctcattcgcaaatccaaccatagctttcttgttcaggctggcaatgttcaacttcgtgttattggccattctatgcaaaattgtctgcttaggcttaaagttgatacttctaaccctaagacacccaagtataaatttgtccgtatccaacctggtcaaacattttcagttctagcatgctacaatggttcaccatctggtgtttatcagtgtgccatgagacctaatcataccattaaaggttctttccttaatggatcatgtggtagtgttggttttaacattgattatgattgcgtgtctttctgctatatgcatcatatggagcttccaacaggagtacacgctggtactgacttagaaggtaaattctatggtccatttgttgacagacaaactgcacaggctgcaggtacagacacaaccataacattaaatgttttggcatggctgtatgctgctgttatcaatggtgataggtggtttcttaatagattcaccactactttgaatgactttaaccttgtggcaatgaagtacaactatgaacctttgacacaagatcatgttgacatattgggacctctttctgctcaaacaggaattgccgtcttagatatgtgtgctgctttgaaagagctgctgcagaatggtatgaatggtcgtactatccttggtagcactattttagaagatgagtttacaccatttgatgttgttagacaatgctctggtgttaccttccaaggtaagttcaagaaaattgttaagggcactcatcattggatgcttttaactttcttgacatcactattgattcttgttcaaagtacacagtggtcactgtttttctttgtttacgagaatgctttcttgccatttactcttggtattatggcaattgctgcatgtgctatgctgcttgttaagcataagcacgcattcttgtgcttgtttctgttaccttctcttgcaacagttgcttactttaatatggtctacatgcctgctagctgggtgatgcgtatcatgacatggcttgaattggctgacactagcttgtctggttataggcttaaggattgtgttatgtatgcttcagctttagttttgcttattctcatgacagctcgcactgtttatgatgatgctgctagacgtgtttggacactgatgaatgtcattacacttgtttacaaagtctactatggtaatgctttagatcaagctatttccatgtgggccttagttatttctgtaacctctaactattctggtgtcgttacgactatcatgtttttagctagagctatagtgtttgtgtgtgttgagtattacccattgttatttattactggcaacaccttacagtgtatcatgcttgtttattgtttcttaggctattgttgctgctgctactttggccttttctgtttactcaaccgttacttcaggcttactcttggtgtttatgactacttggtctctacacaagaatttaggtatatgaactcccaggggcttttgcctcctaagagtagtattgatgctttcaagcttaacattaagttgttgggtattggaggtaaaccatgtatcaaggttgctactgtacagtctaaaatgtctgacgtaaagtgcacatctgtggtactgctctcggttcttcaacaacttagagtagagtcatcttctaaattgtgggcacaatgtgtacaactccacaatgatattcttcttgcaaaagacacaactgaagctttcgagaagatggtttctcttttgtctgttttgctatccatgcagggtgctgtagacattaataggttgtgcgaggaaatgctcgataaccgtgctactcttcaggctattgcttcagaatttagttctttaccatcatatgccgcttatgccactgcccaggaggcctatgagcaggctgtagctaatggtgattctgaagtcgttctcaaaaagttaaagaaatctttgaatgtggctaaatctgagtttgaccgtgatgctgccatgcaacgcaagttggaaaagatggcagatcaggctatgacccaaatgtacaaacaggcaagatctgaggacaagagggcaaaagtaactagtgctatgcaaacaatgctcttcactatgcttaggaagcttgataatgatgcacttaacaacattatcaacaatgcgcgtgatggttgtgttccactcaacatcataccattgactacagcagccaaactcatggttgttgtccctgattatggtacctacaagaacacttgtgatggtaacacctttacatatgcatctgcactctgggaaatccagcaagttgttgatgcggatagcaagattgttcaacttagtgaaattaacatggacaattcaccaaatttggcttggcctcttattgttacagctctaagagccaactcagctgttaaactacagaataatgaactgagtccagtagcactacgacagatgtcctgtgcggctggtaccacacaaacagcttgtactgatgacaatgcacttgcctactataacaattcgaagggaggtaggtttgtgctggcattactatcagaccaccaagatctcaaatgggctagattccctaagagtgatggtacaggtacaatttacacagaactggaaccaccttgtaggtttgttacagacacaccaaaagggcctaaagtgaaatacttgtacttcatcaaaggcttaaacaacctaaatagaggtatggtgctgggcagtttagctgctacagtacgtcttcaggctggaaatgctacagaagtacctgccaattcaactgtgctttccttctgtgcttttgcagtagaccctgctaaagcatataaggattacctagcaagtggaggacaaccaatcaccaactgtgtgaagatgttgtgtacacacactggtacaggacaggcaattactgtaacaccagaagctaacatggaccaagagtcctttggtggtgcttcatgttgtctgtattgtagatgccacattgaccatccaaatcctaaaggattctgtgacttgaaaggtaagtacgtccaaatacctaccacttgtgctaatgacccagtgggttttacacttagaaacacagtctgtaccgtctgcggaatgtggaaaggttatggctgtagttgtgaccaactccgcgaacccttgatgcagtctgcggatgcatcaacgtttttaaacgggtttgcggtgtaagtgcagcccgtcttacaccgtgcggcacaggcactagtactgatgtcgtctacagggcttttgatatttacaacgaaaaagttgctggttttgcaaagttcctaaaaactaattgctgtcgcttccaggagaaggatgaggaaggcaatttattagactcttactttgtagttaagaggcatactatgtctaactaccaacatgaagagactatttataacttggttaaagattgtccagcggttgctgtccatgactttttcaagtttagagtagatggtgacatggtaccacatatatcacgtcagcgtctaactaaatacacaatggctgatttagtctatgctctacgtcattttgatgagggtaattgtgatacattaaaagaaatactcgtcacatacaattgctgtgatgatgattatttcaataagaaggattggtatgacttcgtagagaatcctgacatcttacgcgtatatgctaacttaggtgagcgtgtacgccaatcattattaaagactgtacaattctgcgatgctatgcgtgatgcaggcattgtaggcgtactgacattagataatcaggatcttaatgggaactggtacgatttcggtgatttcgtacaagtagcaccaggctgcggagttcctattgtggattcatattactcattgctgatgcccatcctcactttgactagggcattggctgctgagtcccatatggatgctgatctcgcaaaaccacttattaagtgggatttgctgaaatatgattttacggaagagagactttgtctcttcgaccgttattttaaatattgggaccagacataccatcccaattgtattaactgtttggatgataggtgtatccttcattgtgcaaactttaatgtgttattttctactgtgtttccacctacaagttttggaccactagtaagaaaaatatttgtagatggtgttccttttgttgtttcaactggataccattttcgtgagttaggagtcgtacataatcaggatgtaaacttacatagctcgcgtctcagtttcaaggaacttttagtgtatgctgctgatccagctatgcatgcagcttctggcaatttattgctagataaacgcactacatgcttttcagtagctgcactaacaaacaatgttgcttttcaaactgtcaaacccggtaattttaataaagacttttatgactttgctgtgtctaaaggtttctttaaggaaggaagttctgttgaactaaaacacttcttctttgctcaggatggcaacgctgctatcagtgattatgactattatcgttataatctgccaacaatgtgtgatatcagacaactcctattcgtagttgaagttgttgataaatactttgattgttacgatggtggctgtattaatgccaaccaagtaatcgttaacaatctggataaatcagctggtttcccatttaataaatggggtaaggctagactttattatgactcaatgagttatgaggatcaagatgcacttttcgcgtatactaagcgtaatgtcatccctactataactcaaatgaatcttaagtatgccattagtgcaaagaatagagctcgcaccgtagctggtgtctctatctgtagtactatgacaaatagacagtttcatcagaaattattgaagtcaatagccgccactagaggagctactgtggtaattggaacaagcaagttttacggtggctggcataatatgttaaaaactgtttacagtgatgtagaaactccacaccttatgggttgggattatccaaaatgtgacagagccatgcctaacatgcttaggataatggcctctcttgttcttgctcgcaaacataacacttgctgtaacttatcacaccgtttctacaggttagctaacgagtgtgcgcaagtattaagtgagatggtcatgtgtggcggctcactatatgttaaaccaggtggaacatcatccggtgatgctacaactgcttatgctaatagtgtctttaacatttgtcaagctgttacagccaatgtaaatgcacttctttcaactgatggtaataagatagctgacaagtatgtccgcaatctacaacacaggctctatgagtgtctctatagaaatagggatgttgatcatgaattcgtggatgagttttacgcttacctgcgtaaacatttctccatgatgattctttctgatgatgccgttgtgtgctataacagtaactatgcggctcaaggtttagtagctagcattaagaactttaaggcagttctttattatcaaaataatgtgttcatgtctgaggcaaaatgttggactgagactgaccttactaaaggacctcacgaattttgctcacagcatacaatgctagttaaacaaggagatgattacgtgtacctgccttacccagatccatcaagaatattaggcgcaggctgttttgtcgatgatattgtcaaaacagatggtacacttatgattgaaaggttcgtgtcactggctattgatgcttacccacttacaaaacatcctaatcaggagtatgctgatgtctttcacttgtatttacaatacattagaaagttacatgatgagcttactggccacatgttggacatgtattccgtaatgctaactaatgataacacctcacggtactgggaacctgagttttatgaggctatgtacacaccacatacagtcttgcaggctgtaggtgcttgtgtattgtgcaattcacagacttcacttcgttgcggtgcctgtattaggagaccattcctatgttgcaagtgctgctatgaccatgtcatttcaacatcacacaaattagtgttgtctgttaatccctatgtttgcaatgccccaggttgtgatgtcactgatgtgacacaactgtatctaggaggtatgagctattattgcaagtcacataagcctcccattagttttccattatgtgctaatggtcaggtttttggtttatacaaaaacacatgtgtaggcagtgacaatgtcactgacttcaatgcgatagcaacatgtgattggactaatgctggcgattacatacttgccaacacttgtactgagagactcaagcttttcgcagcagaaacgctcaaagccactgaggaaacatttaagctgtcatatggtattgccactgtacgcgaagtactctctgacagagaattgcatctttcatgggaggttggaaaacctagaccaccattgaacagaaactatgtctttactggttaccgtgtaactaaaaatagtaaagtacagattggagagtacacctttgaaaaaggtgactatggtgatgctgttgtgtacagaggtactacgacatacaagttgaatgttggtgattactttgtgttgacatctcacactgtaatgccacttagtgcacctactctagtgccacaagagcactatgtgagaattactggcttgtacccaacactcaacatctcagatgagttttctagcaatgttgcaaattatcaaaaggtcggcatgcaaaagtactctacactccaaggaccacctggtactggtaagagtcattttgccatcggacttgctctctattacccatctgctcgcatagtgtatacggcatgctctcatgcagctgttgatgccctatgtgaaaaggcattaaaatatttgcccatagataaatgtagtagaatcatacctgcgcgtgcgcgcgtagagtgttttgataaattcaaagtgaattcaacactagaacagtatgttttctgcactgtaaatgcattgccagaaacaactgctgacattgtagtctttgatgaaatctctatggctactaattatgacttgagtgttgtcaatgctagacttcgtgcaaaacactacgtctatattggcgatcctgctcaattaccagccccccgcacattgctgactaaaggcacactagaaccagaatattttaattcagtgtgcagacttatgaaaacaataggtccagacatgttccttggaacttgtcgccgttgtcctgctgaaattgttgacactgtgagtgctttagtttatgacaataagctaaaagcacacaaggataagtcagctcaatgcttcaaaatgttctacaaaggtgttattacacatgatgtttcatctgcaatcaacagacctcaaataggcgttgtaagagaatttcttacacgcaatcctgcttggagaaaagctgtttttatctcaccttataattcacagaacgctgtagcttcaaaaatcttaggattgcctacgcagactgttgattcatcacagggttctgaatatgactatgtcatattcacacaaactactgaaacagcacactcttgtaatgtcaaccgcttcaatgtggctatcacaagggcaaaaattggcattttgtgcataatgtctgatagagatctttatgacaaactgcaatttacaagtctagaaataccacgtcgcaatgtggctacattacaagcagaaaatgtaactggactttttaaggactgtagtaagatcattactggtcttcatcctacacaggcacctacacacctcagcgttgatataaagttcaagactgaaggattatgtgttgacataccaggcataccaaaggacatgacctaccgtagactcatctctatgatgggtttcaaaatgaattaccaagtcaatggttaccctaatatgtttatcacccgcgaagaagctattcgtcacgttcgtgcgtggattggctttgatgtagagggctgtcatgcaactagagatgctgtgggtactaacctacctctccagctaggattttctacaggtgttaacttagtagctgtaccgactggttatgttgacactgaaaataacacagaattcaccagagttaatgcaaaacctccaccaggtgaccagtttaaacatcttataccactcatgtataaaggcttgccctggaatgtagtgcgtattaagatagtacaaatgctcagtgatacactgaaaggattgtcagacagagtcgtgttcgtcctttgggcgcatggctttgagcttacatcaatgaagtactttgtcaagattggacctgaaagaacgtgttgtctgtgtgacaaacgtgcaacttgcttttctacttcatcagatacttatgcctgctggaatcattctgtgggttttgactatgtctataacccatttatgattgatgttcagcagtggggctttacgggtaaccttcagagtaaccatgaccaacattgccaggtacatggaaatgcacatgtggctagttgtgatgctatcatgactagatgtttagcagtccatgagtgctttgttaagcgcgttgattggtctgttgaataccctattataggagatgaactgagggttaattctgcttgcagaaaagtacaacacatggttgtgaagtctgcattgcttgctgataagtttccagttcttcatgacattggaaatccaaaggctatcaagtgtgtgcctcaggctgaagtagaatggaagttctacgatgctcagccatgtagtgacaaagcttacaaaatagaggaactcttctattcttatgctacacatcacgataaattcactgatggtgtttgtttgttttggaattgtaacgttgatcgttacccagccaatgcaattgtgtgtaggtttgacacaagagtcttgtcaaacttgaacttaccaggctgtgatggtggtagtttgtatgtgaataagcatgcattccacactccagctttcgataaaagtgcatttactaatttaaagcaattgcctttcttttactattctgatagtccttgtgagtctcatggcaaacaagtagtgtcggatattgattatgttccactcaaatctgctacgtgtattacacgatgcaatttaggtggtgctgtttgcagacaccatgcaaatgagtaccgacagtacttggatgcatataatatgatgatttctgctggatttagcctatggatttacaaacaatttgatacttataacctgtggaatacatttaccaggttacagagtttagaaaatgtggcttataatgttgttaataaaggacactttgatggacacgccggcgaagcacctgtttccatcattaataatgctgtttacacaaaggtagatggtattgatgtggagatctttgaaaataagacaacacttcctgttaatgttgcatttgagctttgggctaagcgtaacattaaaccagtgccagagattaagatactcaataatttgggtgttgatatcgctgctaatactgtaatctgggactacaaaagagaagccccagcacatgtatctacaataggtgtctgcacaatgactgacattgccaagaaacctactgagagtgcttgttcttcacttactgtcttgtttgatggtagagtggaaggacaggtagacctttttagaaacgcccgtaatggtgttttaataacagaaggttcagtcaaaggtctaacaccttcaaagggaccagcacaagctagcgtcaatggagtcacattaattggagaatcagtaaaaacacagtttaactactttaagaaagtagacggcattattcaacagttgcctgaaacctactttactcagagcagagacttagaggattttaagcccagatcacaaatggaaactgactttctcgagctcgctatggatgaattcatacagcgatataagctcgagggctatgccttcgaacacatcgtttatggagatttcagtcatggacaacttggcggtcttcatttaatgataggcttagccaagcgctcacaagattcaccacttaaattagaggattttatccctatggacagcacagtgaaaaattacttcataacagatgcgcaaacaggttcatcaaaatgtgtgtgttctgtgattgatcttttacttgatgactttgtcgagataataaagtcacaagatttgtcagtgatttcaaaagtggtcaaggttacaattgactatgctgaaatttcattcatgctttggtgtaaggatggacatgttgaaaccttctacccaaaactacaagcaagtcaagcgtggcaaccaggtgttgcgatgcctaacttgtacaagatgcaaagaatgcttcttgaaaagtgtgaccttcagaattatggtgaaaatgctgttataccaaaaggaataatgatgaatgtcgcaaagtatactcaactgtgtcaatacttaaatacacttactttagctgtaccctacaacatgagagttattcactttggtgctggctctgataaaggagttgcaccaggtacagctgtgctcagacaatggttgccaactggcacactacttgtcgattcagatcttaatgacttcgtctccgacgcagattctactttaattggagactgtgcaacagtacatacggctaataaatgggaccttattattagcgatatgtatgaccctaggaccaaacatgtgacaaaagagaatgactctaaagaagggtttttcacttatctgtgtggatttataaagcaaaaactagccctgggtggttctatagctgtaaagataacagagcattcttggaatgctgacctttacaagcttatgggccatttctcatggtggacagcttttgttacaaatgtaaatgcatcatcatcggaagcatttttaattggggctaactatcttggcaagccgaaggaacaaattgatggctataccatgcatgctaactacattttctggaggaacacaaatcctatccagttgtcttcctattcactctttgacatgagcaaatttcctcttaaattaagaggaactgctgtaatgtctcttaaggagaatcaaatcaatgatatgatttattctcttctggaaaaaggtaggcttatcattagagaaaacaacagagttgtggtttcaagtgatattcttgttaacaactaaacgaacatgtttattttcttattatttcttactctcactagtggtagtgaccttgaccggtgcaccacttttgatgatgttcaagctcctaattacactcaacatacttcatctatgaggggggtttactatcctgatgaaatttttagatcagacactctttatttaactcaggatttatttcttccattttattctaatgttacagggtttcatactattaatcatacgtttggcaaccctgtcataccttttaaggatggtatttattttgctgccacagagaaatcaaatgttgtccgtggttgggtttttggttctaccatgaacaacaagtcacagtcggtgattattattaacaattctactaatgttgttatacgagcatgtaactttgaattgtgtgacaaccctttctttgctgtttctaaacccatgggtacacagacacatactatgatattcgataatgcatttaattgcactttcgagtacatatctgatgccttttcgcttgatgtttcagaaaagtcaggtaattttaaacacttacgagagtttgtgtttaaaaataaagatgggtttctctatgtttataagggctatcaacctatagatgtagttcgtgatctaccttctggttttaacactttgaaacctatttttaagttgcctcttggtattaacattacaaattttagagccattcttacagccttttcacctgctcaagacatttggggcacgtcagctgcagcctattttgttggctatttaaagccaactacatttatgctcaagtatgatgaaaatggtacaatcacagatgctgttgattgttctcaaaatccacttgctgaactcaaatgctctgttaagagctttgagattgacaaaggaatttaccagacctctaatttcagggttgttccctcaggagatgttgtgagattccctaatattacaaacttgtgtccttttggagaggtttttaatgctactaaattcccttctgtctatgcatgggagagaaaaaaaatttctaattgtgttgctgattactctgtgctctacaactcaacatttttttcaacctttaagtgctatggcgtttctgccactaagttgaatgatctttgcttctccaatgtctatgcagattcttttgtagtcaagggagatgatgtaagacaaatagcgccaggacaaactggtgttattgctgattataattataaattgccagatgatttcatgggttgtgtccttgcttggaatactaggaacattgatgctacttcaactggtaattataattataaatataggtatcttagacatggcaagcttaggccctttgagagagacatatctaatgtgcctttctcccctgatggcaaaccttgcaccccacctgctcttaattgttattggccattaaatgattatggtttttacaccactactggcattggctaccaaccttacagagttgtagtactttcttttgaacttttaaatgcaccggccacggtttgtggaccaaaattatccactgaccttattaagaaccagtgtgtcaattttaattttaatggactcactggtactggtgtgttaactccttcttcaaagagatttcaaccatttcaacaatttggccgtgatgtttctgatttcactgattccgttcgagatcctaaaacatctgaaatattagacatttcaccttgctcttttgggggtgtaagtgtaattacacctggaacaaatgcttcatctgaagttgctgttctatatcaagatgttaactgcactgatgtttctacagcaattcatgcagatcaactcacaccagcttggcgcatatattctactggaaacaatgtattccagactcaagcaggctgtcttataggagctgagcatgtcgacacttcttatgagtgcgacattcctattggagctggcatttgtgctagttaccatacagtttctttattacgtagtactagccaaaaatctattgtggcttatactatgtctttaggtgctgatagttcaattgcttactctaataacaccattgctatacctactaacttttcaattagcattactacagaagtaatgcctgtttctatggctaaaacctccgtagattgtaatatgtacatctgcggagattctactgaatgtgctaatttgcttctccaatatggtagcttttgcacacaactaaatcgtgcactctcaggtattgctgctgaacaggatcgcaacacacgtgaagtgttcgctcaagtcaaacaaatgtacaaaaccccaactttgaaatattttggtggttttaatttttcacaaatattacctgaccctctaaagccaactaagaggtcttttattgaggacttgctctttaataaggtgacactcgctgatgctggcttcatgaagcaatatggcgaatgcctaggtgatattaatgctagagatctcatttgtgcgcagaagttcaatggacttacagtgttgccacctctgctcactgatgatatgattgctgcctacactgctgctctagttagtggtactgccactgctggatggacatttggtgctggcgctgctcttcaaataccttttgctatgcaaatggcatataggttcaatggcattggagttacccaaaatgttctctatgagaaccaaaaacaaatcgccaaccaatttaacaaggcgattagtcaaattcaagaatcacttacaacaacatcaactgcattgggcaagctgcaagacgttgttaaccagaatgctcaagcattaaacacacttgttaaacaacttagctctaattttggtgcaatttcaagtgtgctaaatgatatcctttcgcgacttgataaagtcgaggcggaggtacaaattgacaggttaattacaggcagacttcaaagccttcaaacctatgtaacacaacaactaatcagggctgctgaaatcagggcttctgctaatcttgctgctactaaaatgtctgagtgtgttcttggacaatcaaaaagagttgacttttgtggaaagggctaccaccttatgtccttcccacaagcagccccgcatggtgttgtcttcctacatgtcacgtatgtgccatcccaggagaggaacttcaccacagcgccagcaatttgtcatgaaggcaaagcatacttccctcgtgaaggtgtttttgtgtttaatggcacttcttggtttattacacagaggaacttcttttctccacaaataattactacagacaatacatttgtctcaggaaattgtgatgtcgttattggcatcattaacaacacagtttatgatcctctgcaacctgagcttgactcattcaaagaagagctggacaagtacttcaaaaatcatacatcaccagatgttgatcttggcgacatttcaggcattaacgcttctgtcgtcaacattcaaaaagaaattgaccgcctcaatgaggtcgctaaaaatttaaatgaatcactcattgaccttcaagaattgggaaaatatgagcaatatattaaatggccttggtatgtttggctcggcttcattgctggactaattgccatcgtcatggttacaatcttgctttgttgcatgactagttgttgcagttgcctcaagggtgcatgctcttgtggttcttgctgcaagtttgatgaggatgactctgagccagttctcaagggtgtcaaattacattacacataaacgaacttatggatttgtttatgagattttttactcttggatcaattactgcacagccagtaaaaattgacaatgcttctcctgcaagtactgttcatgctacagcaacgataccgctacaagcctcactccctttcggatggcttgttattggcgttgcatttcttgctgtttttcagagcgctaccaaaataattgcgctcaataaaagatggcagctagccctttataagggcttccagttcatttgcaatttactgctgctatttgttaccatctattcacatcttttgcttgtcgctgcaggtatggaggcgcaatttttgtacctctatgccttgatatattttctacaatgcatcaacgcatgtagaattattatgagatgttggctttgttggaagtgcaaatccaagaacccattactttatgatgccaactactttgtttgctggcacacacataactatgactactgtataccatataacagtgtcacagatacaattgtcgttactgaaggtgacggcatttcaacaccaaaactcaaagaagactaccaaattggtggttattctgaggataggcactcaggtgttaaagactatgtcgttgtacatggctatttcaccgaagtttactaccagcttgagtctacacaaattactacagacactggtattgaaaatgctacattcttcatctttaacaagcttgttaaagacccaccgaatgtgcaaatacacacaatcgacggctcttcaggagttgctaatccagcaatggatccaatttatgatgagccgacgacgactactagcgtgcctttgtaagcacaagaaagtgagtacgaacttatgtactcattcgtttcggaagaaacaggtacgttaatagttaatagcgtacttctttttcttgctttcgtggtattcttgctagtcacactagccatccttactgcgcttcgattgtgtgcgtactgctgcaatattgttaacgtgagtttagtaaaaccaacggtttacgtctactcgcgtgttaaaaatctgaactcttctgaaggagttcctgatcttctggtctaaacgaactaactattattattattctgtttggaactttaacattgcttatcatggcagacaacggtactattaccgttgaggagcttaaacaactcctggaacaatggaacctagtaataggtttcctattcctagcctggattatgttactacaatttgcctattctaatcggaacaggtttttgtacataataaagcttgttttcctctggctcttgtggccagtaacacttgcttgttttgtgcttgctgctgtctacagaattaattgggtgactggcgggattgcgattgcaatggcttgtattgtaggcttgatgtggcttagctacttcgttgcttccttcaggctgtttgctcgtacccgctcaatgtggtcattcaacccagaaacaaacattcttctcaatgtgcctctccgggggacaattgtgaccagaccgctcatggaaagtgaacttgtcattggtgctgtgatcattcgtggtcacttgcgaatggccggacactccctagggcgctgtgacattaaggacctgccaaaagagatcactgtggctacatcacgaacgctttcttattacaaattaggagcgtcgcagcgtgtaggcactgattcaggttttgctgcatacaaccgctaccgtattggaaactataaattaaatacagaccacgccggtagcaacgacaatattgctttgctagtacagtaagtgacaacagatgtttcatcttgttgatttccaggttacaatagcagagatattgattatcattatgaggactttcaggattgctatttggaatcttgacgttataataagttcaatagtgagacaattatttaagcctctaactaagaagaattattcggagttagatgatgaagaacctatggagttagattatccataaaacgaacatgaaaattattctcttcctgacattgattgtatttacatcttgcgagctatatcactatcaggagtgtgttagaggtacgactgtactactaaaagaaccttgcccatcaggaacatacgagggcaattcaccatttcaccctcttgctgacaataaatttgcactaacttgcactagcacacactttgcttttgcttgtgctgacggtactcgacatacctatcagctgcgtgcaagatcagtttcaccaaaacttttcatcagacaagaggaggttcaacaagagctctactcgccactttttctcattgttgctgctctagtatttttaatactttgcttcaccattaagagaaagacagaatgaatgagctcactttaattgacttctatttgtgctttttagcctttctgctattccttgttttaataatgcttattatattttggttttcactcgaaatccaggatctagaagaaccttgtaccaaagtctaaacgaacatgaaacttctcattgttttgacttgtatttctctatgcagttgcatatgcactgtagtacagcgctgtgcatctaataaacctcatgtgcttgaagatccttgtaaggtacaacactaggggtaatacttatagcactgcttggctttgtgctctaggaaaggttttaccttttcatagatggcacactatggttcaaacatgcacacctaatgttactatcaactgtcaagatccagctggtggtgcgcttatagctaggtgttggtaccttcatgaaggtcaccaaactgctgcatttagagacgtacttgttgttttaaataaacgaacaaattaaaatgtctgataatggaccccaatcaaaccaacgtagtgccccccgcattacatttggtggacccacagattcaactgacaataaccagaatggaggacgcaatggggcaaggccaaaacagcgccgaccccaaggtttacccaataatactgcgtcttggttcacagctctcactcagcatggcaaggaggaacttagattccctcgaggccagggcgttccaatcaacaccaatagtggtccagatgaccaaattggctactaccgaagagctacccgacgagttcgtggtggtgacggcaaaatgaaagagctcagccccagatggtacttctattacctaggaactggcccagaagcttcacttccctacggcgctaacaaagaaggcatcgtatgggttgcaactgagggagccttgaatacacccaaagaccacattggcacccgcaatcctaataacaatgctgccaccgtgctacaacttcctcaaggaacaacattgccaaaaggcttctacgcagagggaagcagaggcggcagtcaagcctcttctcgctcctcatcacgtagtcgcggtaattcaagaaattcaactcctggcagcagtaggggaaattctcctgctcgaatggctagcggaggtggtgaaactgccctcgcgctattgctgctagacagattgaaccagcttgagagcaaagtttctggtaaaggccaacaacaacaaggccaaactgtcactaagaaatctgctgctgaggcatctaaaaagcctcgccaaaaacgtactgccacaaaacagtacaacgtcactcaagcatttgggagacgtggtccagaacaaacccaaggaaatttcggggaccaagacctaatcagacaaggaactgattacaaacattggccgcaaattgcacaatttgctccaagtgcctctgcattctttggaatgtcacgcattggcatggaagtcacaccttcgggaacatggctgacttatcatggagccattaaattggatgacaaagatccacaattcaaagacaacgtcatactgctgaacaagcacattgacgcatacaaaacattcccaccaacagagcctaaaaaggacaaaaagaaaaagactgatgaagctcagcctttgccgcagagacaaaagaagcagcccactgtgactcttcttcctgcggctgacatggatgatttctccagacaacttcaaaattccatgagtggagcttctgctgattcaactcaggcataaacactcatgatgaccacacaaggcagatgggctatgtaaacgttttcgcaattccgtttacgatacatagtctactcttgtgcagaatgaattctcgtaactaaacagcacaagtaggtttagttaactttaatctcacatagcaatctttaatcaatgtgtaacattagggaggacttgaaagagccaccacattttcatcgaggccacgcggagtacgatcgagggtacagtgaataatgctagggagagctgcctatatggaagagccctaatgtgtaaaattaattttagtagtgctatccccatgtgattttaatagcttcttaggagaatgacaa

SEQ ID NO: 29826 - DNA, 29729 bp, SARS Coronavirus
atattaggtttttacctacccaggaaaagccaaccaacctcgatctcttgtagatctgttctctaaacgaactttaaaatctgtgtagctgtcgctcggctgcatgcctagtgcacctacgcagtataaacaataataaattttactgtcgttgacaagaaacgagtaactcgtccctcttctgcagactgcttacggtttcgtccgtgttgcagtcgatcatcagcatacctaggtttcgtccgggtgtgaccgaaaggtaagatggagagccttgttcttggtgtcaacgagaaaacacacgtccaactcagtttgcctgtccttcaggttagagacgtgctagtgcgtggcttcggggactctgtggaagaggccctatcggaggcacgtgaacacctcaaaaatggcacttgtggtctagtagagctggaaaaaggcgtactgccccagcttgaacagccctatgtgttcattaaacgttctgatgccttaagcaccaatcacggccacaaggtcgttgagctggttgcagaaatggacggcattcagtacggtcgtagcggtataacactgggagtactcgtgccacatgtgggcgaaaccccaattgcataccgcaatgttcttcttcgtaagaacggtaataagggagccggtggtcatagctatggcatcgatctaaagtcttatgacttaggtgacgagcttggcactgatcccattgaagattatgaacaaaactggaacactaagcatggcagtggtgcactccgtgaactcactcgtgagctcaatggaggtgcagtcactcgctatgtcgacaacaatttctgtggcccagatgggtaccctcttgattgcatcaaagattttctcgcacgcgcgggcaagtcaatgtgcactctttccgaacaacttgattacatcgagtcgaagagaggtgtctactgctgccgtgaccatgagcatgaaattgcctggttcactgagcgctctgataagagctacgagcaccagacacccttcgaaattaagagtgccaagaaatttgacactttcaaaggggaatgcccaaagtttgtgtttcctcttaactcaaaagtcaaagtcattcaaccacgtgttgaaaagaaaaagactgagggtttcatggggcgtatacgctctgtgtaccctgttgcatctccacaggagtgtaacaatatgcacttgtctaccttgatgaaatgtaatcattgcgatgaagtttcatggcagacgtgcgactttctgaaagccacttgtgaacattgtggcactgaaaatttagttattgaaggacctactacatgtgggtacctacctactaatgctgtagtgaaaatgccatgtcctgcctgtcaagacccagagattggacctgagcatagtgttgcagattatcacaaccactcaaacattgaaactcgactccgcaagggaggtaggactagatgttttggaggctgtgtgtttgcctatgttggctgctataataagcgtgcctactgggttcctcgtgctagtgctgatattggctcaggccatactggcattactggtgacaatgtggagaccttgaatgaggatctccttgagatactgagtcgtgaacgtgttaacattaacattgttggcgattttcatttgaatgaagaggttgccatcattttggcatctttctctgcttctacaagtgcctttattgacactataaagagtcttgattacaagtctttcaaaaccattgttgagtcctgcggtaactataaagttaccaagggaaagcccgtaaaaggtgcttggaacattggacaacagagatcagttttaacaccactgtgtggttttccctcacaggctgctggtgttatcagatcaatttttgcgcgcacacttgatgcagcaaaccactcaattcctgatttgcaaagagcagctgtcaccatacttgatggtatttctgaacagtcattacgtcttgtcgacgccatggtttatacttcagacctgctcaccaacagtgtcattattatggcatatgtaactggtggtcttgtacaacagacttctcagtggttgtctaatcttttgggcactactgttgaaaaactcaggcctatctttgaatggattgaggcgaaacttagtgcaggagttgaatttctcaaggatgcttgggagattctcaaatttctcattacaggtgtttttgacatcgtcaagggtcaaatacaggttgcttcagataacatcaaggattgtgtaaaatgcttcattgatgttgttaacaaggcactcgaaatgtgcattgatcaagtcactatcgctggcgcaaagttgcgatcactcaacttaggtgaagtcttcatcgctcaaagcaagggactttaccgtcagtgtatacgtggcaaggagcagctgcaactactcatgcctcttaaggcaccaaaagaagtaacctttcttgaaggtgattcacatgacacagtacttacctctgaggaggttgttctcaagaacggtgaactcgaagcactcgagacgcccgttgatagcttcacaaatggagctatcgttggcacaccagtctgtgtaaatggcctcatgctcttagagattaaggacaaagaacaatactgcgcattgtctcctggtttactggctacaaacaatgtctttcgcttaaaagggggtgcaccaattaaaggtgtaacctttggagaagatactgtttgggaagttcaaggttacaagaatgtgagaatcacatttgagcttgatgaacgtgttgacaaagtgcttaatgaaaagtgctctgtctacactgttgaatccggtaccgaagttactgagtttgcatgtgttgtagcagaggctgttgtgaagactttacaaccagtttctgatctccttaccaacatgggtattgatcttgatgagtggagtgtagctacattctacttatttgatgatgctggtgaagaaaacttttcatcacgtatgtattgttccttttaccctccagatgaggaagaagaggacgatgcagagtgtgaggaagaagaaattgatgaaacctgtgaacatgagtacggtacagaggatgattatcaaggtctccctctggaatttggtgcctcagctgaaacagttcgagttgaggaagaagaagaggaagactggctggatgatactactgagcaatcagagattgagccagaaccagaacctacacctgaagaaccagttaatcagtttactggttatttaaaacttactgacaatgttgccattaaatgtgttgacatcgttaaggaggcacaaagtgctaatcctatggtgattgtaaatgctgctaacatacacctgaaacatggtggtggtgtagcaggtgcactcaacaaggcaaccaatggtgccatgcaaaaggagagtgatgattacattaagctaaatggccctcttacagtaggagggtcttgtttgctttctggacataatcttgctaagaagtgtctgcatgttgttggacctaacctaaatgcaggtgaggacatccagcttcttaaggcagcatatgaaaatttcaattcacaggacatcttacttgcaccattgttgtcagcaggcatatttggtgctaaaccacttcagtctttacaagtgtgcgtgcagacggttcgtacacaggtttatattgcagtcaatgacaaagctctttatgagcaggttgtcatggattatcttgataacctgaagcctagagtggaagcacctaaacaagaggagccaccaaacacagaagattccaaaactgaggagaaatctgtcgtacagaagcctgtcgatgtgaagccaaaaattaaggcctgcattgatgaggttaccacaacactggaagaaactaagtttcttaccaataagttactcttgtttgctgatatcaatggtaagctttaccatgattctcagaacatgcttagaggtgaagatatgtctttccttgagaaggatgcaccttacatggtaggtgatgttatcactagtggtgatatcacttgtgttgtaataccctccaaaaaggctggtggcactactgagatgctctcaagagctttgaagaaagtgccagttgatgagtatataaccacgtaccctggacaaggatgtgctggttatacacttgaggaagctaagactgctcttaagaaatgcaaatctgcattttatgtactaccttcagaagcacctaatgctaaggaagagattctaggaactgtatcctggaatttgagagaaatgcttgctcatgctgaagagacaagaaaattaatgcctatatgcatggatgttagagccataatggcaaccatccaacgtaagtataaaggaattaaaattcaagagggcatcgttgactatggtgtccgattcttcttttatactagtaaagagcctgtagcttctattattacgaagctgaactctctaaatgagccgcttgtcacaatgccaattggttatgtgacacatggttttaatcttgaagaggctgcgcgctgtatgcgttctcttaaagctcctgccgtagtgtcagtatcatcaccagatgctgttactacatataatggatacctcacttcgtcatcaaagacatctgaggagcactttgtagaaacagtttctttggctggctcttacagagattggtcctattcaggacagcgtacagagttaggtgttgaatttcttaagcgtggtgacaaaattgtgtaccacactctggagagccccgtcgagtttcatcttgacggtgaggttctttcacttgacaaactaaagagtctcttatccctgcgggaggttaagactataaaagtgttcacaactgtggacaacactaatctccacacacagcttgtggatatgtctatgacatatggacagcagtttggtccaacatacttggatggtgctgatgttacaaaaattaaacctcatgtaaatcatgagggtaagactttctttgtactacctagtgatgacacactacgtagtgaagctttcgagtactaccatactcttgatgagagttttcttggtaggtacatgtctgctttaaaccacacaaagaaatggaaatttcctcaagttggtggtttaacttcaattaaatgggctgataacaattgttatttgtctagtgttttattagcacttcaacagcttgaagtcaaattcaatgcaccagcacttcaagaggcttattatagagcccgtgctggtgatgctgctaacttttgtgcactcatactcgcttacagtaataaaactgttggcgagcttggtgatgtcagagaaactatgacccatcttctacagcatgctaatttggaatctgcaaagcgagttcttaatgtggtgtgtaaacattgtggtcagaaaactactaccttaacgggtgtagaagctgtgatgtatatgggtactctatcttatgataatcttaagacaggtgtttccattccatgtgtgtgtggtcgtgatgctacacaatatctagtacaacaagagtcttcttttgttatgatgtctgcaccacctgctgagtataaattacagcaaggtacattcttatgtgcgaatgagtacactggtaactatcagtgtggtcattacactcatataactgctaaggagaccctctatcgtattgacggagctcaccttacaaagatgtcagagtacaaaggaccagtgactgatgttttctacaaggaaacatcttacactacaaccatcaagcctgtgtcgtataaactcgatggagttacttacacagagattgaaccaaaattggatgggtattataaaaaggataatgcttactatacagagcagcctatagaccttgtaccaactcaaccattaccaaatgcgagttttgataatttcaaactcacatgttctaacacaaaatttgctgatgatttaaatcaaatgacaggcttcacaaagccagcttcacgagagctatctgtcacattcttcccagacttgaatggcgatgtagtggctattgactatagacactattcagcgagtttcaagaaaggtgctaaattactgcataagccaattgtttggcacattaaccaggctacaaccaagacaacgttcaaaccaaacacttggtgtttacgttgtctttggagtacaaagccagtagatacttcaaattcatttgaagttctggcagtagaagacacacaaggaatggacaatcttgcttgtgaaagtcaacaacccacctctgaagaagtagtggaaaatcctaccatacagaaggaagtcatagagtgtgacgtgaaaactaccgaagttgtaggcaatgtcatacttaaaccatcagatgaaggtgttaaagtaacacaagagttaggtcatgaggatcttatggctgcttatgtggaaaacacaagcattaccattaagaaacctaatgagctttcactagccttaggtttaaaaacaattgccactcatggtattgctgcaattaatagtgttccttggagtaaaattttggcttatgtcaaaccattcttaggacaagcagcaattacaacatcaaattgcgctaagagattagcacaacgtgtgtttaacaattatatgccttatgtgtttacattattgttccaattgtgtacttttactaaaagtaccaattctagaattagagcttcactacctacaactattgctaaaaatagtgttaagagtgttgctaaattatgtttggatgccggcattaattatgtgaagtcacccaaattttctaaattgttcacaatcgctatgtggctattgttgttaagtatttgcttaggttctctaatctgtgtaactgctgcttttggtgtactcttatctaattttggtgctccttcttattgtaatggcgttagagaattgtatcttaattcgtctaacgttactactatggatttctgtgaaggttcttttccttgcagcatttgtttaagtggattagactcccttgattcttatccagctcttgaaaccattcaggtgacgatttcatcgtacaagctagacttgacaattttaggtctggccgctgagtgggttttggcatatatgttgttcacaaaattcttttatttattaggtctttcagctataatgcaggtgttctttggctattttgctagtcatttcatcagcaattcttggctcatgtggtttatcattagtattgtacaaatggcacccgtttctgcaatggttaggatgtacatcttctttgcttctttctactacatatggaagagctatgttcatatcatggatggttgcacctcttcgacttgcatgatgtgctataagcgcaatcgtgccacacgcgttgagtgtacaactattgttaatggcatgaagagatctttctatgtctatgcaaatggaggccgtggcttctgcaagactcacaattggaattgtctcaattgtgacacattttgcactggtagtacattcattagtgatgaagttgctcgtgatttgtcactccagtttaaaagaccaatcaaccctactgaccagtcatcgtatattgttgatagtgttgctgtgaaaaatggcgcgcttcacctctactttgacaaggctggtcaaaagacctatgagagacatccgctctcccattttgtcaatttagacaatttgagagctaacaacactaaaggttcactgcctattaatgtcatagtttttgatggcaagtccaaatgcgacgagtctgcttctaagtctgcttctgtgtactacagtcagctgatgtgccaacctattctgttgcttgaccaagctcttgtatcagacgttggagatagtactgaagtttccgttaagatgtttgatgcttatgtcgacaccttttcagcaacttttagtgttcctatggaaaaacttaaggcacttgttgctacagctcacagcgagttagcaaagggtgtagctttagatggtgtcctttctacattcgtgtcagctgcccgacaaggtgttgttgataccgatgttgacacaaaggatgttattgaatgtctcaaactttcacatcactctgacttagaagtgacaggtgacagttgtaacaatttcatgctcacctataataaggttgaaaacatgacgcccagagatcttggcgcatgtattgactgtaatgcaaggcatatcaatgcccaagtagcaaaaagtcacaatgtttcactcatctggaatgtaaaagactacatgtctttatctgaacagctgcgtaaacaaattcgtagtgctgccaagaagaacaacataccttttagactaacttgtgctacaactagacaggttgtcaatgtcataactactaaaatctcactcaagggtggtaagattgttagtacttgttttaaacttatgcttaaggccacattattgtgcgttcttgctgcattggtttgttatatcgttatgccagtacatacattgtcaatccatgatggttacacaaatgaaatcattggttacaaagccattcaggatggtgtcactcgtgacatcatttctactgatgattgttttgcaaataaacatgctggttttgacgcatggtttagccagcgtggtggttcatacaaaaatgacaaaagctgccctgtagtagctgctatcattacaagagagattggtttcatagtgcctggcttaccgggtactgtgctgagagcaatcaatggtgacttcttgcattttctacctcgtgtttttagtgctgttggcaacatttgctacacaccttccaaactcattgagtatagtgattttgctacctctgcttgcgttcttgctgctgagtgtacaatttttaaggatgctatgggcaaacctgtgccatattgttatgacactaatttgctagagggttctatttcttatagtgagcttcgtccagacactcgttatgtgcttatggatggttccatcatacagtttcctaacacttacctggagggttctgttagagtagtaacaacttttgatgctgagtactgtagacatggtacatgcgaaaggtcagaagtaggtatttgcctatctaccagtggtagatgggttcttaataatgagcattacagagctctatcaggagttttctgtggtgttgatgcgatgaatctcatagctaacatctttactcctcttgtgcaacctgtgggtgctttagatgtgtctgcttcagtagtggctggtggtattattgccatattggtgacttgtgctgcctactactttatgaaattcagacgtgtttttggtgagtacaaccatgttgttgctgctaatgcacttttgtttttgatgtctttcactatactctgtctggtaccagcttacagctttctgccgggagtctactcagtcttttacttgtacttgacattctatttcaccaatgatgtttcattcttggctcaccttcaatggtttgccatgttttctcctattgtgcctttttggataacagcaatctatgtattctgtatttctctgaagcactgccattggttctttaacaactatcttaggaaaagagtcatgtttaatggagttacatttagtaccttcgaggaggctgctttgtgtacctttttgctcaacaaggaaatgtacctaaaattgcgtagcgagacactgttgccacttacacagtataacaggtatcttgctctatataacaagtacaagtatttcagtggagccttagatactaccagctatcgtgaagcagcttgctgccacttagcaaaggctctaaatgactttagcaactcaggtgctgatgttctctaccaaccaccacagacatcaatcacttctgctgttctgcagagtggttttaggaaaatggcattcccgtcaggcaaagttgaagggtgcatggtacaagtaacctgtggaactacaactcttaatggattgtggttggatgacacagtatactgtccaagacatgtcatttgcacagcagaagacatgcttaatcctaactatgaagatctgctcattcgcaaatccaaccatagctttcttgttcaggctggcaatgttcaacttcgtgttattggccattctatgcaaaattgtctgcttaggcttaaagttgatacttctaaccctaagacacccaagtataaatttgtccgtatccaacctggtcaaacattttcagttctagcatgctacaatggttcaccatctggtgtttatcagtgtgccatgagacctaatcataccattaaaggttctttccttaatggatcatgtggtagtgttggttttaacattgattatgattgcgtgtctttctgctatatgcatcatatggagcttccaacaggagtacacgctggtactgacttagaaggtaaattctatggtccatttgttgacagacaaactgcacaggctgcaggtacagacacaaccataacattaaatgttttggcatggctgtatgctgctgttatcaatggtgataggtggtttcttaatagattcaccactactttgaatgactttaaccttgtggcaatgaagtacaactatgaacctttgacacaagatcatgttgacatattgggacctctttctgctcaaacaggaattgccgtcttagatatgtgtgctgctttgaaagagctgctgcagaatggtatgaatggtcgtactatccttggtagcactattttagaagatgagtttacaccatttgatgttgttagacaatgctctggtgttaccttccaaggtaagttcaagaaaattgttaagggcactcatcattggatgcttttaactttcttgacatcactattgattcttgttcaaagtacacagtggtcactgtttttctttgtttacgagaatgctttcttgccatttactcttggtattatggcaattgctgcatgtgctatgctgcttgttaagcataagcacgcattcttgtgcttgtttctgttaccttctcttgcaacagttgcttactttaatatggtctacatgcctgctagctgggtgatgcgtatcatgacatggcttgaattggctgacactagcttgtctggttataggcttaaggattgtgttatgtatgcttcagctttagttttgcttattctcatgacagctcgcactgtttatgatgatgctgctagacgtgtttggacactgatgaatgtcattacacttgtttacaaagtctactatggtaatgctttagatcaagctatttccatgtgggccttagttatttctgtaacctctaactattctggtgtcgttacgactatcatgtttttagctagagctatagtgtttgtgtgtgttgagtattacccattgttatttattactggcaacaccttacagtgtatcatgcttgtttattgtttcttaggctattgttgctgctgctactttggccttttctgtttactcaaccgttacttcaggcttactcttggtgtttatgactacttggtctctacacaagaatttaggtatatgaactcccaggggcttttgcctcctaagagtagtattgatgctttcaagcttaacattaagttgttgggtattggaggtaaaccatgtatcaaggttgctactgtacagtctaaaatgtctgacgtaaagtgcacatctgtggtactgctctcggttcttcaacaacttagagtagagtcatcttctaaattgtgggcacaatgtgtacaactccacaatgatattcttcttgcaaaagacacaactgaagctttcgagaagatggtttctcttttgtctgttttgctatccatgcagggtgctgtagacattaataggttgtgcgaggaaatgctcgataaccgtgctactcttcaggctattgcttcagaatttagttctttaccatcatatgccgcttatgccactgcccaggaggcctatgagcaggctgtagctaatggtgattctgaagtcgttctcaaaaagttaaagaaatctttgaatgtggctaaatctgagtttgaccgtgatgctgccatgcaacgcaagttggaaaagatggcagatcaggctatgacccaaatgtacaaacaggcaagatctgaggacaagagggcaaaagtaactagtgctatgcaaacaatgctcttcactatgcttaggaagcttgataatgatgcacttaacaacattatcaacaatgcgcgtgatggttgtgttccactcaacatcataccattgactacagcagccaaactcatggttgttgtccctgattatggtacctacaagaacacttgtgatggtaacacctttacatatgcatctgcactctgggaaatccagcaagttgttgatgcggatagcaagattgttcaacttagtgaaattaacatggacaattcaccaaatttggcttggcctcttattgttacagctctaagagccaactcagctgttaaactacagaataatgaactgagtccagtagcactacgacagatgtcctgtgcggctggtaccacacaaacagcttgtactgatgacaatgcacttgcctactataacaattcgaagggaggtaggtttgtgctggcattactatcagaccaccaagatctcaaatgggctagattccctaagagtgatggtacaggtacaatttacacagaactggaaccaccttgtaggtttgttacagacacaccaaaagggcctaaagtgaaatacttgtacttcatcaaaggcttaaacaacctaaatagaggtatggtgctgggcagtttagctgctacagtacgtcttcaggctggaaatgctacagaagtacctgccaattcaactgtgctttccttctgtgcttttgcagtagaccctgctaaagcatataaggattacctagcaagtggaggacaaccaatcaccaactgtgtgaagatgttgtgtacacacactggtacaggacaggcaattactgtaacaccagaagctaacatggaccaagagtcctttggtggtgcttcatgttgtctgtattgtagatgccacattgaccatccaaatcctaaaggattctgtgacttgaaaggtaagtacgtccaaatacctaccacttgtgctaatgacccagtgggttttacacttagaaacacagtctgtaccgtctgcggaatgtggaaaggttatggctgtagttgtgaccaactccgcgaacccttgatgcagtctgcggatgcatcaacgtttttaaacgggtttgcggtgtaagtgcagcccgtcttacaccgtgcggcacaggcactagtactgatgtcgtctacagggcttttgatatttacaacgaaaaagttgctggttttgcaaagttcctaaaaactaattgctgtcgcttccaggagaaggatgaggaaggcaatttattagactcttactttgtagttaagaggcatactatgtctaactaccaacatgaagagactatttataacttggttaaagattgtccagcggttgctgtccatgactttttcaagtttagagtagatggtgacatggtaccacatatatcacgtcagcgtctaactaaatacacaatggctgatttagtctatgctctacgtcattttgatgagggtaattgtgatacattaaaagaaatactcgtcacatacaattgctgtgatgatgattatttcaataagaaggattggtatgacttcgtagagaatcctgacatcttacgcgtatatgctaacttaggtgagcgtgtacgccaatcattattaaagactgtacaattctgcgatgctatgcgtgatgcaggcattgtaggcgtactgacattagataatcaggatcttaatgggaactggtacgatttcggtgatttcgtacaagtagcaccaggctgcggagttcctattgtggattcatattactcattgctgatgcccatcctcactttgactagggcattggctgctgagtcccatatggatgctgatctcgcaaaaccacttattaagtgggatttgctgaaatatgattttacggaagagagactttgtctcttcgaccgttattttaaatattgggaccagacataccatcccaattgtattaactgtttggatgataggtgtatccttcattgtgcaaactttaatgtgttattttctactgtgtttccacctacaagttttggaccactagtaagaaaaatatttgtagatggtgttccttttgttgtttcaactggataccattttcgtgagttaggagtcgtacataatcaggatgtaaacttacatagctcgcgtctcagtttcaaggaacttttagtgtatgctgctgatccagctatgcatgcagcttctggcaatttattgctagataaacgcactacatgcttttcagtagctgcactaacaaacaatgttgcttttcaaactgtcaaacccggtaattttaataaagacttttatgactttgctgtgtctaaaggtttctttaaggaaggaagttctgttgaactaaaacacttcttctttgctcaggatggcaacgctgctatcagtgattatgactattatcgttataatctgccaacaatgtgtgatatcagacaactcctattcgtagttgaagttgttgataaatactttgattgttacgatggtggctgtattaatgccaaccaagtaatcgttaacaatctggataaatcagctggtttcccatttaataaatggggtaaggctagactttattatgactcaatgagttatgaggatcaagatgcacttttcgcgtatactaagcgtaatgtcatccctactataactcaaatgaatcttaagtatgccattagtgcaaagaatagagctcgcaccgtagctggtgtctctatctgtagtactatgacaaatagacagtttcatcagaaattattgaagtcaatagccgccactagaggagctactgtggtaattggaacaagcaagttttacggtggctggcataatatgttaaaaactgtttacagtgatgtagaaactccacaccttatgggttgggattatccaaaatgtgacagagccatgcctaacatgcttaggataatggcctctcttgttcttgctcgcaaacataacacttgctgtaacttatcacaccgtttctacaggttagctaacgagtgtgcgcaagtattaagtgagatggtcatgtgtggcggctcactatatgttaaaccaggtggaacatcatccggtgatgctacaactgcttatgctaatagtgtctttaacatttgtcaagctgttacagccaatgtaaatgcacttctttcaactgatggtaataagatagctgacaagtatgtccgcaatctacaacacaggctctatgagtgtctctatagaaatagggatgttgatcatgaattcgtggatgagttttacgcttacctgcgtaaacatttctccatgatgattctttctgatgatgccgttgtgtgctataacagtaactatgcggctcaaggtttagtagctagcattaagaactttaaggcagttctttattatcaaaataatgtgttcatgtctgaggcaaaatgttggactgagactgaccttactaaaggacctcacgaattttgctcacagcatacaatgctagttaaacaaggagatgattacgtgtacctgccttacccagatccatcaagaatattaggcgcaggctgttttgtcgatgatattgtcaaaacagatggtacacttatgattgaaaggttcgtgtcactggctattgatgcttacccacttacaaaacatcctaatcaggagtatgctgatgtctttcacttgtatttacaatacattagaaagttacatgatgagcttactggccacatgttggacatgtattccgtaatgctaactaatgataacacctcacggtactgggaacctgagttttatgaggctatgtacacaccacatacagtcttgcaggctgtaggtgcttgtgtattgtgcaattcacagacttcacttcgttgcggtgcctgtattaggagaccattcctatgttgcaagtgctgctatgaccatgtcatttcaacatcacacaaattagtgttgtctgttaatccctatgtttgcaatgccccaggttgtgatgtcactgatgtgacacaactgtatctaggaggtatgagctattattgcaagtcacataagcctcccattagttttccattatgtgctaatggtcaggtttttggtttatacaaaaacacatgtgtaggcagtgacaatgtcactgacttcaatgcgatagcaacatgtgattggactaatgctggcgattacatacttgccaacacttgtactgagagactcaagcttttcgcagcagaaacgctcaaagccactgaggaaacatttaagctgtcatatggtattgccactgtacgcgaagtactctctgacagagaattgcatctttcatgggaggttggaaaacctagaccaccattgaacagaaactatgtctttactggttaccgtgtaactaaaaatagtaaagtacagattggagagtacacctttgaaaaaggtgactatggtgatgctgttgtgtacagaggtactacgacatacaagttgaatgttggtgattactttgtgttgacatctcacactgtaatgccacttagtgcacctactctagtgccacaagagcactatgtgagaattactggcttgtacccaacactcaacatctcagatgagttttctagcaatgttgcaaattatcaaaaggtcggcatgcaaaagtactctacactccaaggaccacctggtactggtaagagtcattttgccatcggacttgctctctattacccatctgctcgcatagtgtatacggcatgctctcatgcagctgttgatgccctatgtgaaaaggcattaaaatatttgcccatagataaatgtagtagaatcatacctgcgcgtgcgcgcgtagagtgttttgataaattcaaagtgaattcaacactagaacagtatgttttctgcactgtaaatgcattgccagaaacaactgctgacattgtagtctttgatgaaatctctatggctactaattatgacttgagtgttgtcaatgctagacttcgtgcaaaacactacgtctatattggcgatcctgctcaattaccagccccccgcacattgctgactaaaggcacactagaaccagaatattttaattcagtgtgcagacttatgaaaacaataggtccagacatgttccttggaacttgtcgccgttgtcctgctgaaattgttgacactgtgagtgctttagtttatgacaataagctaaaagcacacaaggataagtcagctcaatgcttcaaaatgttctacaaaggtgttattacacatgatgtttcatctgcaatcaacagacctcaaataggcgttgtaagagaatttcttacacgcaatcctgcttggagaaaagctgtttttatctcaccttataattcacagaacgctgtagcttcaaaaatcttaggattgcctacgcagactgttgattcatcacagggttctgaatatgactatgtcatattcacacaaactactgaaacagcacactcttgtaatgtcaaccgcttcaatgtggctatcacaagggcaaaaattggcattttgtgcataatgtctgatagagatctttatgacaaactgcaatttacaagtctagaaataccacgtcgcaatgtggctacattacaagcagaaaatgtaactggactttttaaggactgtagtaagatcattactggtcttcatcctacacaggcacctacacacctcagcgttgatataaagttcaagactgaaggattatgtgttgacataccaggcataccaaaggacatgacctaccgtagactcatctctatgatgggtttcaaaatgaattaccaagtcaatggttaccctaatatgtttatcacccgcgaagaagctattcgtcacgttcgtgcgtggattggctttgatgtagagggctgtcatgcaactagagatgctgtgggtactaacctacctctccagctaggattttctacaggtgttaacttagtagctgtaccgactggttatgttgacactgaaaataacacagaattcaccagagttaatgcaaaacctccaccaggtgaccagtttaaacatcttataccactcatgtataaaggcttgccctggaatgtagtgcgtattaagatagtacaaatgctcagtgatacactgaaaggattgtcagacagagtcgtgttcgtcctttgggcgcatggctttgagcttacatcaatgaagtactttgtcaagattggacctgaaagaacgtgttgtctgtgtgacaaacgtgcaacttgcttttctacttcatcagatacttatgcctgctggaatcattctgtgggttttgactatgtctataacccatttatgattgatgttcagcagtggggctttacgggtaaccttcagagtaaccatgaccaacattgccaggtacatggaaatgcacatgtggctagttgtgatgctatcatgactagatgtttagcagtccatgagtgctttgttaagcgcgttgattggtctgttgaataccctattataggagatgaactgagggttaattctgcttgcagaaaagtacaacacatggttgtgaagtctgcattgcttgctgataagtttccagttcttcatgacattggaaatccaaaggctatcaagtgtgtgcctcaggctgaagtagaatggaagttctacgatgctcagccatgtagtgacaaagcttacaaaatagaggaactcttctattcttatgctacacatcacgataaattcactgatggtgtttgtttgttttggaattgtaacgttgatcgttacccagccaatgcaattgtgtgtaggtttgacacaagagtcttgtcaaacttgaacttaccaggctgtgatggtggtagtttgtatgtgaataagcatgcattccacactccagctttcgataaaagtgcatttactaatttaaagcaattgcctttcttttactattctgatagtccttgtgagtctcatggcaaacaagtagtgtcggatattgattatgttccactcaaatctgctacgtgtattacacgatgcaatttaggtggtgctgtttgcagacaccatgcaaatgagtaccgacagtacttggatgcatataatatgatgatttctgctggatttagcctatggatttacaaacaatttgatacttataacctgtggaatacatttaccaggttacagagtttagaaaatgtggcttataatgttgttaataaaggacactttgatggacacgccggcgaagcacctgtttccatcattaataatgctgtttacacaaaggtagatggtattgatgtggagatctttgaaaataagacaacacttcctgttaatgttgcatttgagctttgggctaagcgtaacattaaaccagtgccagagattaagatactcaataatttgggtgttgatatcgctgctaatactgtaatctgggactacaaaagagaagccccagcacatgtatctacaataggtgtctgcacaatgactgacattgccaagaaacctactgagagtgcttgttcttcacttactgtcttgtttgatggtagagtggaaggacaggtagacctttttagaaacgcccgtaatggtgttttaataacagaaggttcagtcaaaggtctaacaccttcaaagggaccagcacaagctagcgtcaatggagtcacattaattggagaatcagtaaaaacacagtttaactactttaagaaagtagacggcattattcaacagttgcctgaaacctactttactcagagcagagacttagaggattttaagcccagatcacaaatggaaactgactttctcgagctcgctatggatgaattcatacagcgatataagctcgagggctatgccttcgaacacatcgtttatggagatttcagtcatggacaacttggcggtcttcatttaatgataggcttagccaagcgctcacaagattcaccacttaaattagaggattttatccctatggacagcacagtgaaaaattacttcataacagatgcgcaaacaggttcatcaaaatgtgtgtgttctgtgattgatcttttacttgatgactttgtcgagataataaagtcacaagatttgtcagtgatttcaaaagtggtcaaggttacaattgactatgctgaaatttcattcatgctttggtgtaaggatggacatgttgaaaccttctacccaaaactacaagcaagtcaagcgtggcaaccaggtgttgcgatgcctaacttgtacaagatgcaaagaatgcttcttgaaaagtgtgaccttcagaattatggtgaaaatgctgttataccaaaaggaataatgatgaatgtcgcaaagtatactcaactgtgtcaatacttaaatacacttactttagctgtaccctacaacatgagagttattcactttggtgctggctctgataaaggagttgcaccaggtacagctgtgctcagacaatggttgccaactggcacactacttgtcgattcagatcttaatgacttcgtctccgacgcagattctactttaattggagactgtgcaacagtacatacggctaataaatgggaccttattattagcgatatgtatgaccctaggaccaaacatgtgacaaaagagaatgactctaaagaagggtttttcacttatctgtgtggatttataaagcaaaaactagccctgggtggttctatagctgtaaagataacagagcattcttggaatgctgacctttacaagcttatgggccatttctcatggtggacagcttttgttacaaatgtaaatgcatcatcatcggaagcatttttaattggggctaactatcttggcaagccgaaggaacaaattgatggctataccatgcatgctaactacattttctggaggaacacaaatcctatccagttgtcttcctattcactctttgacatgagcaaatttcctcttaaattaagaggaactgctgtaatgtctcttaaggagaatcaaatcaatgatatgatttattctcttctggaaaaaggtaggcttatcattagagaaaacaacagagttgtggtttcaagtgatattcttgttaacaactaaacgaacatgtttattttcttattatttcttactctcactagtggtagtgaccttgaccggtgcaccacttttgatgatgttcaagctcctaattacactcaacatacttcatctatgaggggggtttactatcctgatgaaatttttagatcagacactctttatttaactcaggatttatttcttccattttattctaatgttacagggtttcatactattaatcatacgtttggcaaccctgtcataccttttaaggatggtatttattttgctgccacagagaaatcaaatgttgtccgtggttgggtttttggttctaccatgaacaacaagtcacagtcggtgattattattaacaattctactaatgttgttatacgagcatgtaactttgaattgtgtgacaaccctttctttgctgtttctaaacccatgggtacacagacacatactatgatattcgataatgcatttaattgcactttcgagtacatatctgatgccttttcgcttgatgtttcagaaaagtcaggtaattttaaacacttacgagagtttgtgtttaaaaataaagatgggtttctctatgtttataagggctatcaacctatagatgtagttcgtgatctaccttctggttttaacactttgaaacctatttttaagttgcctcttggtattaacattacaaattttagagccattcttacagccttttcacctgctcaagacatttggggcacgtcagctgcagcctattttgttggctatttaaagccaactacatttatgctcaagtatgatgaaaatggtacaatcacagatgctgttgattgttctcaaaatccacttgctgaactcaaatgctctgttaagagctttgagattgacaaaggaatttaccagacctctaatttcagggttgttccctcaggagatgttgtgagattccctaatattacaaacttgtgtccttttggagaggtttttaatgctactaaattcccttctgtctatgcatgggagagaaaaaaaatttctaattgtgttgctgattactctgtgctctacaactcaacatttttttcaacctttaagtgctatggcgtttctgccactaagttgaatgatctttgcttctccaatgtctatgcagattcttttgtagtcaagggagatgatgtaagacaaatagcgccaggacaaactggtgttattgctgattataattataaattgccagatgatttcatgggttgtgtccttgcttggaatactaggaacattgatgctacttcaactggtaattataattataaatataggtatcttagacatggcaagcttaggccctttgagagagacatatctaatgtgcctttctcccctgatggcaaaccttgcaccccacctgctcttaattgttattggccattaaatgattatggtttttacaccactactggcattggctaccaaccttacagagttgtagtactttcttttgaacttttaaatgcaccggccacggtttgtggaccaaaattatccactgaccttattaagaaccagtgtgtcaattttaattttaatggactcactggtactggtgtgttaactccttcttcaaagagatttcaaccatttcaacaatttggccgtgatgtttctgatttcactgattccgttcgagatcctaaaacatctgaaatattagacatttcaccttgctcttttgggggtgtaagtgtaattacacctggaacaaatgcttcatctgaagttgctgttctatatcaagatgttaactgcactgatgtttctacagcaattcatgcagatcaactcacaccagcttggcgcatatattctactggaaacaatgtattccagactcaagcaggctgtcttataggagctgagcatgtcgacacttcttatgagtgcgacattcctattggagctggcatttgtgctagttaccatacagtttctttattacgtagtactagccaaaaatctattgtggcttatactatgtctttaggtgctgatagttcaattgcttactctaataacaccattgctatacctactaacttttcaattagcattactacagaagtaatgcctgtttctatggctaaaacctccgtagattgtaatatgtacatctgcggagattctactgaatgtgctaatttgcttctccaatatggtagcttttgcacacaactaaatcgtgcactctcaggtattgctgctgaacaggatcgcaacacacgtgaagtgttcgctcaagtcaaacaaatgtacaaaaccccaactttgaaatattttggtggttttaatttttcacaaatattacctgaccctctaaagccaactaagaggtcttttattgaggacttgctctttaataaggtgacactcgctgatgctggcttcatgaagcaatatggcgaatgcctaggtgatattaatgctagagatctcatttgtgcgcagaagttcaatggacttacagtgttgccacctctgctcactgatgatatgattgctgcctacactgctgctctagttagtggtactgccactgctggatggacatttggtgctggcgctgctcttcaaataccttttgctatgcaaatggcatataggttcaatggcattggagttacccaaaatgttctctatgagaaccaaaaacaaatcgccaaccaatttaacaaggcgattagtcaaattcaagaatcacttacaacaacatcaactgcattgggcaagctgcaagacgttgttaaccagaatgctcaagcattaaacacacttgttaaacaacttagctctaattttggtgcaatttcaagtgtgctaaatgatatcctttcgcgacttgataaagtcgaggcggaggtacaaattgacaggttaattacaggcagacttcaaagccttcaaacctatgtaacacaacaactaatcagggctgctgaaatcagggcttctgctaatcttgctgctactaaaatgtctgagtgtgttcttggacaatcaaaaagagttgacttttgtggaaagggctaccaccttatgtccttcccacaagcagccccgcatggtgttgtcttcctacatgtcacgtatgtgccatcccaggagaggaacttcaccacagcgccagcaatttgtcatgaaggcaaagcatacttccctcgtgaaggtgtttttgtgtttaatggcacttcttggtttattacacagaggaacttcttttctccacaaataattactacagacaatacatttgtctcaggaaattgtgatgtcgttattggcatcattaacaacacagtttatgatcctctgcaacctgagcttgactcattcaaagaagagctggacaagtacttcaaaaatcatacatcaccagatgttgatcttggcgacatttcaggcattaacgcttctgtcgtcaacattcaaaaagaaattgaccgcctcaatgaggtcgctaaaaatttaaatgaatcactcattgaccttcaagaattgggaaaatatgagcaatatattaaatggccttggtatgtttggctcggcttcattgctggactaattgccatcgtcatggttacaatcttgctttgttgcatgactagttgttgcagttgcctcaagggtgcatgctcttgtggttcttgctgcaagtttgatgaggatgactctgagccagttctcaagggtgtcaaattacattacacataaacgaacttatggatttgtttatgagattttttactcttggatcaattactgcacagccagtaaaaattgacaatgcttctcctgcaagtactgttcatgctacagcaacgataccgctacaagcctcactccctttcggatggcttgttattggcgttgcatttcttgctgtttttcagagcgctaccaaaataattgcgctcaataaaagatggcagctagccctttataagggcttccagttcatttgcaatttactgctgctatttgttaccatctattcacatcttttgcttgtcgctgcaggtatggaggcgcaatttttgtacctctatgccttgatatattttctacaatgcatcaacgcatgtagaattattatgagatgttggctttgttggaagtgcaaatccaagaacccattactttatgatgccaactactttgtttgctggcacacacataactatgactactgtataccatataacagtgtcacagatacaattgtcgttactgaaggtgacggcatttcaacaccaaaactcaaagaagactaccaaattggtggttattctgaggataggcactcaggtgttaaagactatgtcgttgtacatggctatttcaccgaagtttactaccagcttgagtctacacaaattactacagacactggtattgaaaatgctacattcttcatctttaacaagcttgttaaagacccaccgaatgtgcaaatacacacaatcgacggctcttcaggagttgctaatccagcaatggatccaatttatgatgagccgacgacgactactagcgtgcctttgtaagcacaagaaagtgagtacgaacttatgtactcattcgtttcggaagaaacaggtacgttaatagttaatagcgtacttctttttcttgctttcgtggtattcttgctagtcacactagccatccttactgcgcttcgattgtgtgcgtactgctgcaatattgttaacgtgagtttagtaaaaccaacggtttacgtctactcgcgtgttaaaaatctgaactcttctgaaggagttcctgatcttctggtctaaacgaactaactattattattattctgtttggaactttaacattgcttatcatggcagacaacggtactattaccgttgaggagcttaaacaactcctggaacaatggaacctagtaataggtttcctatgcctagcctggattatgttactacaatttgcctattctaatcggaacaggtttttgtacataataaagcttgttttcctctggctcttgtggccagtaacacttgcttgttttgtgcttgctgctgtctacagaattaattgggtgactggcgggattgcgattgcaatggcttgtattgtaggcttgatgtggcttagctacttcgttgcttccttcaggctgtttgctcgtacccgctcaatgtggtcattcaacccagaaacaaacattcttctcaatgtgcctctccgggggacaattgtgaccagaccgctcatggaaagtgaacttgtcattggtgctgtgatcattcgtggtcacttgcgaatggccggacactccctagggcgctgtgacattaaggacctgccaaaagagatcactgtggctacatcacgaacgctttcttattacaaattaggagcgtcgcagcgtgtaggcactgattcaggttttgctgcatacaaccgctaccgtattggaaactataaattaaatacagaccacgccggtagcaacgacaatattgctttgctagtacagtaagtgacaacagatgtttcatcttgttgacttccaggttacaatagcagagatattgattatcattatgaggactttcaggattgctatttggaatcttgacgttataataagttcaatagtgagacaattatttaagcctctaactaagaagaattattcggagttagatgatgaagaacctatggagttagattatccataaaacgaacatgaaaattattctcttcctgacattgattgtatttacatcttgcgagctatatcactatcaggagtgtgttagaggtacgactgtactactaaaagaaccttgcccatcaggaacatacgagggcaattcaccatttcaccctcttgctgacaataaatttgcactaacttgcactagcacacactttgcttttgcttgtgctgacggtactcgacatacctatcagctgcgtgcaagatcagtttcaccaaaacttttcatcagacaagaggaggttcaacaagagctctactcgccactttttctcattgttgctgctctagtatttttaatactttgcttcaccattaagagaaagacagaatgaatgagctcactttaattgacttctatttgtgctttttagcctttctgctattccttgttttaataatgcttattatattttggttttcactcgaaatccaggatctagaagaaccttgtaccaaagtctaaacgaacatgaaacttctcattgttttgacttgtatttctctatgcagttgcatatgcactgtagtacagcgctgtgcatctaataaacctcatgtgcttgaagatccttgtaaggtacaacactaggggtaatacttatagcactgcttggctttgtgctctaggaaaggttttaccttttcatagatggcacactatggttcaaacatgcacacctaatgttactatcaactgtcaagatccagctggtggtgcgcttatagctaggtgttggtaccttcatgaaggtcaccaaactgctgcatttagagacgtacttgttgttttaaataaacgaacaaattaaaatgtctgataatggaccccaatcaaaccaacgtagtgccccccgcattacatttggtggacccacagattcaactgacaataaccagaatggaggacgcaatggggcaaggccaaaacagcgccgaccccaaggtttacccaataatactgcgtcttggttcacagctctcactcagcatggcaaggaggaacttagattccctcgaggccagggcgttccaatcaacaccaatagtggtccagatgaccaaattggctactaccgaagagctacccgacgagttcgtggtggtgacggcaaaatgaaagagctcagccccagatggtacttctattacctaggaactggcccagaagcttcacttccctacggcgctaacaaagaaggcatcgtatgggttgcaactgagggagccttgaatacacccaaagaccacattggcacccgcaatcctaataacaatgctgccaccgtgctacaacttcctcaaggaacaacattgccaaaaggcttctacgcagagggaagcagaggcggcagtcaagcctcttctcgctcctcatcacgtagtcgcggtaattcaagaaattcaactcctggcagcagtaggggaaattctcctgctcgaatggctagcggaggtggtgaaactgccctcgcgctattgctgctagacagattgaaccagcttgagagcaaagtttctggtaaaggccaacaacaacaaggccaaactgtcactaagaaatctgctgctgaggcatctaaaaagcctcgccaaaaacgtactgccacaaaacagtacaacgtcactcaagcatttgggagacgtggtccagaacaaacccaaggaaatttcggggaccaagacctaatcagacaaggaactgattacaaacattggccgcaaattgcacaatttgctccaagtgcctctgcattctttggaatgtcacgcattggcatggaagtcacaccttcgggaacatggctgacttatcatggagccattaaattggatgacaaagatccacaattcaaagacaacgtcatactgctgaacaagcacattgacgcatacaaaacattcccaccaacagagcctaaaaaggacaaaaagaaaaagactgatgaagctcagcctttgccgcagagacaaaagaagcagcccactgtgactcttcttcctgcggctgacatggatgatttctccagacaacttcaaaattccatgagtggagcttctgctgattcaactcaggcataaacactcatgatgaccacacaaggcagatgggctatgtaaacgttttcgcaattccgtttacgatacatagtctactcttgtgcagaatgaattctcgtaactaaacagcacaagtaggtttagttaactttaatctcacatagcaatctttaatcaatgtgtaacattagggaggacttgaaagagccaccacattttcatcgaggccacgcggagtacgatcgagggtacagtgaataatgctagggagagctgcctatatggaagagccctaatgtgtaaaattaattttagtagtgctatccccatgtgattttaatagcttcttaggagaatgacaa

SEQ ID NO: 29827 - DNA, 29729 bp, SARS Coronavirus
atattaggtttttacctacccaggaaaagccaaccaacctcgatctcttgtagatctgttctctaaacgaactttaaaatctgtgtagctgtcgctcggctgcatgcctagtgcacctacgcagtataaacaataataaattttactgtcgttgacaagaaacgagtaactcgtccctcttctgcagactgcttacggtttcgtccgtgttgcagtcgatcatcagcatacctaggtttcgtccgggtgtgaccgaaaggtaagatggagagccttgttcttggtgtcaacgagaaaacacacgtccaactcagtttgcctgtccttcaggttagagacgtgctagtgcgtggcttcggggactctgtggaagaggccctatcggaggcacgtgaacacctcaaaaatggcacttgtggtctagtagagctggaaaaaggcgtactgccccagcttgaacagccctatgtgttcattaaacgttctgatgccttaagcaccaatcacggccacaaggtcgttgagctggttgcagaaatggacggcattcagtacggtcgtagcggtataacactgggagtactcgtgccacatgtgggcgaaaccccaattgcataccgcaatgttcttcttcgtaagaacggtaataagggagccggtggtcatagctatggcatcgatctaaagtcttatgacttaggtgacgagcttggcactgatcccattgaagattatgaacaaaactggaacactaagcatggcagtggtgcactccgtgaactcactcgtgagctcaatggaggtgcagtcactcgctatgtcgacaacaatttctgtggcccagatgggtaccctcttgattgcatcaaagattttctcgcacgcgcgggcaagtcaatgtgcactctttccgaacaacttgattacatcgagtcgaagagaggtgtctactgctgccgtgaccatgagcatgaaattgcctggttcactgagcgctctgataagagctacgagcaccagacacccttcgaaattaagagtgccaagaaatttgacactttcaaaggggaatgcccaaagtttgtgtttcctcttaactcaaaagtcaaagtcattcaaccacgtgttgaaaagaaaaagactgagggtttcatggggcgtatacgctctgtgtaccctgttgcatctccacaggagtgtaacaatatgcacttgtctaccttgatgaaatgtaatcattgcgatgaagtttcatggcagacgtgcgactttctgaaagccacttgtgaacattgtggcactgaaaatttagttattgaaggacctactacatgtgggtacctacctactaatgctgtagtgaaaatgccatgtcctgcctgtcaagacccagagattggacctgagcatagtgttgcagattatcacaaccactcaaacattgaaactcgactccgcaagggaggtaggactagatgttttggaggctgtgtgtttgcctatgttggctgctataataagcgtgcctactgggttcctcgtgctagtgctgatattggctcaggccatactggcattactggtgacaatgtggagaccttgaatgaggatctccttgagatactgagtcgtgaacgtgttaacattaacattgttggcgattttcatttgaatgaagaggttgccatcattttggcatctttctctgcttctacaagtgcctttattgacactataaagagtcttgattacaagtctttcaaaaccattgttgagtcctgcggtaactataaagttaccaagggaaagcccgtaaaaggtgcttggaacattggacaacagagatcagttttaacaccactgtgtggttttccctcacaggctgctggtgttatcagatcaatttttgcgcgcacacttgatgcagcaaaccactcaattcctgatttgcaaagagcagctgtcaccatacttgatggtatttctgaacagtcattacgtcttgtcgacgccatggtttatacttcagacctgctcaccaacagtgtcattattatggcatatgtaactggtggtcttgtacaacagacttctcagtggttgtctaatcttttgggcactactgttgaaaaactcaggcctatctttgaatggattgaggcgaaacttagtgcaggagttgaatttctcaaggatgcttgggagattctcaaatttctcattacaggtgtttttgacatcgtcaagggtcaaatacaggttgcttcagataacatcaaggattgtgtaaaatgcttcattgatgttgttaacaaggcactcgaaatgtgcattgatcaagtcactatcgctggcgcaaagttgcgatcactcaacttaggtgaagtcttcatcgctcaaagcaagggactttaccgtcagtgtatacgtggcaaggagcagctgcaactactcatgcctcttaaggcaccaaaagaagtaacctttcttgaaggtgattcacatgacacagtacttacctctgaggaggttgttctcaagaacggtgaactcgaagcactcgagacgcccgttgatagcttcacaaatggagctatcgttggcacaccagtctgtgtaaatggcctcatgctcttagagattaaggacaaagaacaatactgcgcattgtctcctggtttactggctacaaacaatgtctttcgcttaaaagggggtgcaccaattaaaggtgtaacctttggagaagatactgtttgggaagttcaaggttacaagaatgtgagaatcacatttgagcttgatgaacgtgttgacaaagtgcttaatgaaaagtgctctgtctacactgttgaatccggtaccgaagttactgagtttgcatgtgttgtagcagaggctgttgtgaagactttacaaccagtttctgatctccttaccaacatgggtattgatcttgatgagtggagtgtagctacattctacttatttgatgatgctggtgaagaaaacttttcatcacgtatgtattgttccttttaccctccagatgaggaagaagaggacgatgcagagtgtgaggaagaagaaattgatgaaacctgtgaacatgagtacggtacagaggatgattatcaaggtctccctctggaatttggtgcctcagctgaaacagttcgagttgaggaagaagaagaggaagactggctggatgatactactgagcaatcagagattgagccagaaccagaacctacacctgaagaaccagttaatcagtttactggttatttaaaacttactgacaatgttgccattaaatgtgttgacatcgttaaggaggcacaaagtgctaatcctatggtgattgtaaatgctgctaacatacacctgaaacatggtggtggtgtagcaggtgcactcaacaaggcaaccaatggtgccatgcaaaaggagagtgatgattacattaagctaaatggccctcttacagtaggagggtcttgtttgctttctggacataatcttgctaagaagtgtctgcatgttgttggacctaacctaaatgcaggtgaggacatccagcttcttaaggcagcatatgaaaatttcaattcacaggacatcttacttgcaccattgttgtcagcaggcatatttggtgctaaaccacttcagtctttacaagtgtgcgtgcagacggttcgtacacaggtttatattgcagtcaatgacaaagctctttatgagcaggttgtcatggattatcttgataacctgaagcctagagtggaagcacctaaacaagaggagccaccaaacacagaagattccaaaactgaggagaaatccgtcgtacagaagcctgtcgatgtgaagccaaaaattaaggcctgcattgatgaggttaccacaacactggaagaaactaagtttcttaccaataagttactcttgtttgctgatatcaatggtaagctttaccatgattctcagaacatgcttagaggtgaagatatgtctttccttgagaaggatgcaccttacatggtaggtgatgttatcactagtggtgatatcacttgtgttgtaataccctccaaaaaggctggtggcactactgagatgctctcaagagctttgaagaaagtgccagttgatgagtatataaccacgtaccctggacaaggatgtgctggttatacacttgaggaagctaagactgctcttaagaaatgcaaatctgcattttatgtactaccttcagaagcacctaatgctaaggaagagattctaggaactgtatcctggaatttgagagaaatgcttgctcatgctgaagagacaagaaaattaatgcctatatgcatggatgttagagccataatggcaaccatccaacgtaagtataaaggaattaaaattcaagagggcatcgttgactatggtgtccgattcttcttttatactagtaaagagcctgtagcttctattattacgaagctgaactctctaaatgagccgcttgtcacaatgccaattggttatgtgacacatggttttaatcttgaagaggctgcgcgctgtatgcgttctcttaaagctcctgccgtagtgtcagtatcatcaccagatgctgttactacatataatggatacctcacttcgtcatcaaagacatctgaggagcactttgtagaaacagtttctttggctggctcttacagagattggtcctattcaggacagcgtacagagttaggtgttgaatttcttaagcgtggtgacaaaattgtgtaccacactctggagagccccgtcgagtttcatcttgacggtgaggttctttcacttgacaaactaaagagtctcttatccctgcgggaggttaagactataaaagtgttcacaactgtggacaacactaatctccacacacagcttgtggatatgtctatgacatatggacagcagtttggtccaacatacttggatggtgctgatgttacaaaaattaaacctcatgtaaatcatgagggtaagactttctttgtactacctagtgatgacacactacgtagtgaagctttcgagtactaccatactcttgatgagagttttcttggtaggtacatgtctgctttaaaccacacaaagaaatggaaatttcctcaagttggtggtttaacttcaattaaatgggctgataacaattgttatttgtctagtgttttattagcacttcaacagcttgaagtcaaattcaatgcaccagcacttcaagaggcttattatagagcccgtgctggtgatgctgctaacttttgtgcactcatactcgcttacagtaataaaactgttggcgagcttggtgatgtcagagaaactatgacccatcttctacagcatgctaatttggaatctgcaaagcgagttcttaatgtggtgtgtaaacattgtggtcagaaaactactaccttaacgggtgtagaagctgtgatgtatatgggtactctatcttatgataatcttaagacaggtgtttccattccatgtgtgtgtggtcgtgatgctacacaatatctagtacaacaagagtcttcttttgttatgatgtctgcaccacctgctgagtataaattacagcaaggtacattcttatgtgcgaatgagtacactggtaactatcagtgtggtcattacactcatataactgctaaggagaccctctatcgtattgacggagctcaccttacaaagatgtcagagtacaaaggaccagtgactgatgttttctacaaggaaacatcttacactacaaccatcaagcctgtgtcgtataaactcgatggagttacttacacagagattgaaccaaaattggatgggtattataaaaaggataatgcttactatacagagcagcctatagaccttgtaccaactcaaccattaccaaatgcgagttttgataatttcaaactcacatgttctaacacaaaatttgctgatgatttaaatcaaatgacaggcttcacaaagccagcttcacgagagctatctgtcacattcttcccagacttgaatggcgatgtagtggctattgactatagacactattcagcgagtttcaagaaaggtgctaaattactgcataagccaattgtttggcacattaaccaggctacaaccaagacaacgttcaaaccaaacacttggtgtttacgttgtctttggagtacaaagccagtagatacttcaaattcatttgaagttctggcagtagaagacacacaaggaatggacaatcttgcttgtgaaagtcaacaacccacctctgaagaagtagtggaaaatcctaccatacagaaggaagtcatagagtgtgacgtgaaaactaccgaagttgtaggcaatgtcatacttaaaccatcagatgaaggtgttaaagtaacacaagagttaggtcatgaggatcttatggctgcttatgtggaaaacacaagcattaccattaagaaacctaatgagctttcactagccttaggtttaaaaacaattgccactcatggtattgctgcaattaatagtgttccttggagtaaaattttggcttatgtcaaaccattcttaggacaagcagcaattacaacatcaaattgcgctaagagattagcacaacgtgtgtttaacaattatatgccttatgtgtttacattattgttccaattgtgtacttttactaaaagtaccaattctagaattagagcttcactacctacaactattgctaaaaatagtgttaagagtgttgctaaattatgtttggatgccggcattaattatgtgaagtcacccaaattttctaaattgttcacaatcgctatgtggctattgttgttaagtatttgcttaggttctctaatctgtgtaactgctgcttttggtgtactcttatctaattttggtgctccttcttattgtaatggcgttagagaattgtatcttaattcgtctaacgttactactatggatttctgtgaaggttcttttccttgcagcatttgtttaagtggattagactcccttgattcttatccagctcttgaaaccattcaggtgacgatttcatcgtacaagctagacttgacaattttaggtctggccgctgagtgggttttggcatatatgttgttcacaaaattcttttatttattaggtctttcagctataatgcaggtgttctttggctattttgctagtcatttcatcagcaattcttggctcatgtggtttatcattagtattgtacaaatggcacccgtttctgcaatggttaggatgtacatcttctttgcttctttctactacatatggaagagctatgttcatatcatggatggttgcacctcttcgacttgcatgatgtgctataagcgcaatcgtgccacacgcgttgagtgtacaactattgttaatggcatgaagagatctttctatgtctatgcaaatggaggccgtggcttctgcaagactcacaattggaattgtctcaattgtgacacattttgcactggtagtacattcattagtgatgaagttgctcgtgatttgtcactccagtttaaaagaccaatcaaccctactgaccagtcatcgtatattgttgatagtgttgctgtgaaaaatggcgcgcttcacctctactttgacaaggctggtcaaaagacctatgagagacatccgctctcccattttgtcaatttagacaatttgagagctaacaacactaaaggttcactgcctattaatgtcatagtttttgatggcaagtccaaatgcgacgagtctgcttctaagtctgcttctgtgtactacagtcagctgatgtgccaacctattctgttgcttgaccaagctcttgtatcagacgttggagatagtactgaagtttccgttaagatgtttgatgcttatgtcgacaccttttcagcaacttttagtgttcctatggaaaaacttaaggcacttgttgctacagctcacagcgagttagcaaagggtgtagctttagatggtgtcctttctacattcgtgtcagctgcccgacaaggtgttgttgataccgatgttgacacaaaggatgttattgaatgtctcaaactttcacatcactctgacttagaagtgacaggtgacagttgtaacaatttcatgctcacctataataaggttgaaaacatgacgcccagagatcttggcgcatgtattgactgtaatgcaaggcatatcaatgcccaagtagcaaaaagtcacaatgtttcactcatctggaatgtaaaagactacatgtctttatctgaacagctgcgtaaacaaattcgtagtgctgccaagaagaacaacataccttttagactaacttgtgctacaactagacaggttgtcaatgtcataactactaaaatctcactcaagggtggtaagattgttagtacttgttttaaacttatgcttaaggccacattattgtgcgttcttgctgcattggtttgttatatcgttatgccagtacatacattgtcaatccatgatggttacacaaatgaaatcattggttacaaagccattcaggatggtgtcactcgtgacatcatttctactgatgattgttttgcaaataaacatgctggttttgacgcatggtttagccagcgtggtggttcatacaaaaatgacaaaagctgccctgtagtagctgctatcattacaagagagattggtttcatagtgcctggcttaccgggtactgtgctgagagcaatcaatggtgacttcttgcattttctacctcgtgtttttagtgctgttggcaacatttgctacacaccttccaaactcattgagtatagtgattttgctacctctgcttgcgttcttgctgctgagtgtacaatttttaaggatgctatgggcaaacctgtgccatattgttatgacactaatttgctagagggttctatttcttatagtgagcttcgtccagacactcgttatgtgcttatggatggttccatcatacagtttcctaacacttacctggagggttctgttagagtagtaacaacttttgatgctgagtactgtagacatggtacatgcgaaaggtcagaagtaggtatttgcctatctaccagtggtagatgggttcttaataatgagcattacagagctctatcaggagttttctgtggtgttgatgcgatgaatctcatagctaacatctttactcctcttgtgcaacctgtgggtgctttagatgtgtctgcttcagtagtggctggtggtattattgccatattggtgacttgtgctgcctactactttatgaaattcagacgtgtttttggtgagtacaaccatgttgttgctgctaatgcacttttgtttttgatgtctttcactatactctgtctggtaccagcttacagctttctgccgggagtctactcagtcttttacttgtacttgacattctatttcaccaatgatgtttcattcttggctcaccttcaatggtttgccatgttttctcctattgtgcctttttggataacagcaatctatgtattctgtatttctctgaagcactgccattggttctttaacaactatcttaggaaaagagtcatgtttaatggagttacatttagtaccttcgaggaggctgctttgtgtacctttttgctcaacaaggaaatgtacctaaaattgcgtagcgagacactgttgccacttacacagtataacaggtatcttgctctatataacaagtacaagtatttcagtggagccttagatactaccagctatcgtgaagcagcttgctgccacttagcaaaggctctaaatgactttagcaactcaggtgctgatgttctctaccaaccaccacagacatcaatcacttctgctgttctgcagagtggttttaggaaaatggcattcccgtcaggcaaagttgaagggtgcatggtacaagtaacctgtggaactacaactcttaatggattgtggttggatgacacagtatactgtccaagacatgtcatttgcacagcagaagacatgcttaatcctaactatgaagatctgctcattcgcaaatccaaccatagctttcttgttcaggctggcaatgttcaacttcgtgttattggccattctatgcaaaattgtctgcttaggcttaaagttgatacttctaaccctaagacacccaagtataaatttgtccgtatccaacctggtcaaacattttcagttctagcatgctacaatggttcaccatctggtgtttatcagtgtgccatgagacctaatcataccattaaaggttctttccttaatggatcatgtggtagtgttggttttaacattgattatgattgcgtgtctttctgctatatgcatcatatggagcttccaacaggagtacacgctggtactgacttagaaggtaaattctatggtccatttgttgacagacaaactgcacaggctgcaggtacagacacaaccataacattaaatgttttggcatggctgtatgctgctgttatcaatggtgataggtggtttcttaatagattcaccactactttgaatgactttaaccttgtggcaatgaagtacaactatgaacctttgacacaagatcatgttgacatattgggacctctttctgctcaaacaggaattgccgtcttagatatgtgtgctgctttgaaagagctgctgcagaatggtatgaatggtcgtactatccttggtagcactattttagaagatgagtttacaccatttgatgttgttagacaatgctctggtgttaccttccaaggtaagttcaagaaaattgttaagggcactcatcattggatgcttttaactttcttgacatcactattgattcttgttcaaagtacacagtggtcactgtttttctttgtttacgagaatgctttcttgccatttactcttggtattatggcaattgctgcatgtgctatgctgcttgttaagcataagcacgcattcttgtgcttgtttctgttaccttctcttgcaacagttgcttactttaatatggtctacatgcctgctagctgggtgatgcgtatcatgacatggcttgaattggctgacactagcttgtctggttataggcttaaggattgtgttatgtatgcttcagctttagttttgcttattctcatgacagctcgcactgtttatgatgatgctgctagacgtgtttggacactgatgaatgtcattacacttgtttacaaagtctactatggtaatgctttagatcaagctatttccatgtgggccttagttatttctgtaacctctaactattctggtgtcgttacgactatcatgtttttagctagagctatagtgtttgtgtgtgttgagtattatccattgttatttattactggcaacaccttacagtgtatcatgcttgtttattgtttcttaggctattgttgctgctgctactttggccttttctgtttactcaaccgttacttcaggcttactcttggtgtttatgactacttggtctctacacaagaatttaggtatatgaactcccaggggcttttgcctcctaagagtagtattgatgctttcaagcttaacattaagttgttgggtattggaggtaaaccatgtatcaaggttgctactgtacagtctaaaatgtctgacgtaaagtgcacatctgtggtactgctctcggttcttcaacaacttagagtagagtcatcttctaaattgtgggcacaatgtgtacaactccacaatgatattcttcttgcaaaagacacaactgaagctttcgagaagatggtttctcttttgtctgttttgctatccatgcagggtgctgtagacattaataggttgtgcgaggaaatgctcgataaccgtgctactcttcaggctattgcttcagaatttagttctttaccatcatatgccgcttatgccactgcccaggaggcctatgagcaggctgtagctaatggtgattctgaagtcgttctcaaaaagttaaagaaatctttgaatgtggctaaatctgagtttgaccgtgatgctgccatgcaacgcaagttggaaaagatggcagatcaggctatgacccaaatgtacaaacaggcaagatctgaggacaagagggcaaaagtaactagtgctatgcaaacaatgctcttcactatgcttaggaagcttgataatgatgcacttaacaacattatcaacaatgcgcgtgatggttgtgttccactcaacatcataccattgactacagcagccaaactcatggttgttgtccctgattatggtacctacaagaacacttgtgatggtaacacctttacatatgcatctgcactctgggaaatccagcaagttgttgatgcggatagcaagattgttcaacttagtgaaattaacatggacaattcaccaaatttggcttggcctcttattgttacagctctaagagccaactcagctgttaaactacagaataatgaactgagtccagtagcactacgacagatgtcctgtgcggctggtaccacacaaacagcttgtactgatgacaatgcacttgcctactataacaattcgaagggaggtaggtttgtgctggcattactatcagaccaccaagatctcaaatgggctagattccctaagagtgatggtacaggtacaatttacacagaactggaaccaccttgtaggtttgttacagacacaccaaaagggcctaaagtgaaatacttgtacttcatcaaaggcttaaacaacctaaatagaggtatggtgctgggcagtttagctgctacagtacgtcttcaggctggaaatgctacagaagtacctgccaattcaactgtgctttccttctgtgcttttgcagtagaccctgctaaagcatataaggattacctagcaagtggaggacaaccaatcaccaactgtgtgaagatgttgtgtacacacactggtacaggacaggcaattactgtaacaccagaagctaacatggaccaagagtcctttggtggtgcttcatgttgtctgtattgtagatgccacattgaccatccaaatcctaaaggattctgtgacttgaaaggtaagtacgtccaaatacctaccacttgtgctaatgacccagtgggttttacacttagaaacacagtctgtaccgtctgcggaatgtggaaaggttatggctgtagttgtgaccaactccgcgaacccttgatgcagtctgcggatgcatcaacgtttttaaacgggtttgcggtgtaagtgcagcccgtcttacaccgtgcggcacaggcactagtactgatgtcgtctacagggcttttgatatttacaacgaaaaagttgctggttttgcaaagttcctaaaaactaattgctgtcgcttccaggagaaggatgaggaaggcaatttattagactcttactttgtagttaagaggcatactatgtctaactaccaacatgaagagactatttataacttggttaaagattgtccagcggttgctgtccatgactttttcaagtttagagtagatggtgacatggtaccacatatatcacgtcagcgtctaactaaatacacaatggctgatttagtctatgctctacgtcattttgatgagggtaattgtgatacattaaaagaaatactcgtcacatacaattgctgtgatgatgattatttcaataagaaggattggtatgacttcgtagagaatcctgacatcttacgcgtatatgctaacttaggtgagcgtgtacgccaatcattattaaagactgtacaattctgcgatgctatgcgtgatgcaggcattgtaggcgtactgacattagataatcaggatcttaatgggaactggtacgatttcggtgatttcgtacaagtagcaccaggctgcggagttcctattgtggattcatattactcattgctgatgcccatcctcactttgactagggcattggctgctgagtcccatatggatgctgatctcgcaaaaccacttattaagtgggatttgctgaaatatgattttacggaagagagactttgtctcttcgaccgttattttaaatattgggaccagacataccatcccaattgtattaactgtttggatgataggtgtatccttcattgtgcaaactttaatgtgttattttctactgtgtttccacctacaagttttggaccactagtaagaaaaatatttgtagatggtgttccttttgttgtttcaactggataccattttcgtgagttaggagtcgtacataatcaggatgtaaacttacatagctcgcgtctcagtttcaaggaacttttagtgtatgctgctgatccagctatgcatgcagcttctggcaatttattgctagataaacgcactacatgcttttcagtagctgcactaacaaacaatgttgcttttcaaactgtcaaacccggtaattttaataaagacttttatgactttgctgtgtctaaaggtttctttaaggaaggaagttctgttgaactaaaacacttcttctttgctcaggatggcaacgctgctatcagtgattatgactattatcgttataatctgccaacaatgtgtgatatcagacaactcctattcgtagttgaagttgttgataaatactttgattgttacgatggtggctgtattaatgccaaccaagtaatcgttaacaatctggataaatcagctggtttcccatttaataaatggggtaaggctagactttattatgactcaatgagttatgaggatcaagatgcacttttcgcgtatactaagcgtaatgtcatccctactataactcaaatgaatcttaagtatgccattagtgcaaagaatagagctcgcaccgtagctggtgtctctatctgtagtactatgacaaatagacagtttcatcagaaattattgaagtcaatagccgccactagaggagctactgtggtaattggaacaagcaagttttacggtggctggcataatatgttaaaaactgtttacagtgatgtagaaactccacaccttatgggttgggattatccaaaatgtgacagagccatgcctaacatgcttaggataatggcctctcttgttcttgctcgcaaacataacacttgctgtaacttatcacaccgtttctacaggttagctaacgagtgtgcgcaagtattaagtgagatggtcatgtgtggcggctcactatatgttaaaccaggtggaacatcatccggtgatgctacaactgcttatgctaatagtgtctttaacatttgtcaagctgttacagccaatgtaaatgcacttctttcaactgatggtaataagatagctgacaagtatgtccgcaatctacaacacaggctctatgagtgtctctatagaaatagggatgttgatcatgaattcgtggatgagttttacgcttacctgcgtaaacatttctccatgatgattctttctgatgatgccgttgtgtgctataacagtaactatgcggctcaaggtttagtagctagcattaagaactttaaggcagttctttattatcaaaataatgtgttcatgtctgaggcaaaatgttggactgagactgaccttactaaaggacctcacgaattttgctcacagcatacaatgctagttaaacaaggagatgattacgtgtacctgccttacccagatccatcaagaatattaggcgcaggctgttttgtcgatgatattgtcaaaacagatggtacacttatgattgaaaggttcgtgtcactggctattgatgcttacccacttacaaaacatcctaatcaggagtatgctgatgtctttcacttgtatttacaatacattagaaagttacatgatgagcttactggccacatgttggacatgtattccgtaatgctaactaatgataacacctcacggtactgggaacctgagttttatgaggctatgtacacaccacatacagtcttgcaggctgtaggtgcttgtgtattgtgcaattcacagacttcacttcgttgcggtgcctgtattaggagaccattcctatgttgcaagtgctgctatgaccatgtcatttcaacatcacacaaattagtgttgtctgttaatccctatgtttgcaatgccccaggttgtgatgtcactgatgtgacacaactgtatctaggaggtatgagctattattgcaagtcacataagcctcccattagttttccattatgtgctaatggtcaggtttttggtttatacaaaaacacatgtgtaggcagtgacaatgtcactgacttcaatgcgatagcaacatgtgattggactaatgctggcgattacatacttgccaacacttgtactgagagactcaagcttttcgcagcagaaacgctcaaagccactgaggaaacatttaagctgtcatatggtattgccactgtacgcgaagtactctctgacagagaattgcatctttcatgggaggttggaaaacctagaccaccattgaacagaaactatgtctttactggttaccgtgtaactaaaaatagtaaagtacagattggagagtacacctttgaaaaaggtgactatggtgatgctgttgtgtacagaggtactacgacatacaagttgaatgttggtgattactttgtgttgacatctcacactgtaatgccacttagtgcacctactctagtgccacaagagcactatgtgagaattactggcttgtacccaacactcaacatctcagatgagttttctagcaatgttgcaaattatcaaaaggtcggcatgcaaaagtactctacactccaaggaccacctggtactggtaagagtcattttgccatcggacttgctctctattacccatctgctcgcatagtgtatacggcatgctctcatgcagctgttgatgccctatgtgaaaaggcattaaaatatttgcccatagataaatgtagtagaatcatacctgcgcgtgcgcgcgtagagtgttttgataaattcaaagtgaattcaacactagaacagtatgttttctgcactgtaaatgcattgccagaaacaactgctgacattgtagtctttgatgaaatctctatggctactaattatgacttgagtgttgtcaatgctagacttcgtgcaaaacactacgtctatattggcgatcctgctcaattaccagccccccgcacattgctgactaaaggcacactagaaccagaatattttaattcagtgtgcagacttatgaaaacaataggtccagacatgttccttggaacttgtcgccgttgtcctgctgaaattgttgacactgtgagtgctttagtttatgacaataagctaaaagcacacaaggataagtcagctcaatgcttcaaaatgttctacaaaggtgttattacacatgatgtttcatctgcaatcaacagacctcaaataggcgttgtaagagaatttcttacacgcaatcctgcttggagaaaagctgtttttatctcaccttataattcacagaacgctgtagcttcaaaaatcttaggattgcctacgcagactgttgattcatcacagggttctgaatatgactatgtcatattcacacaaactactgaaacagcacactcttgtaatgtcaaccgcttcaatgtggctatcacaagggcaaaaattggcattttgtgcataatgtctgatagagatctttatgacaaactgcaatttacaagtctagaaataccacgtcgcaatgtggctacattacaagcagaaaatgtaactggactttttaaggactgtagtaagatcattactggtcttcatcctacacaggcacctacacacctcagcgttgatataaagttcaagactgaaggattatgtgttgacataccaggcataccaaaggacatgacctaccgtagactcatctctatgatgggtttcaaaatgaattaccaagtcaatggttaccctaatatgtttatcacccgcgaagaagctattcgtcacgttcgtgcgtggattggctttgatgtagagggctgtcatgcaactagagatgctgtgggtactaacctacctctccagctaggattttctacaggtgttaacttagtagctgtaccgactggttatgttgacactgaaaataacacagaattcaccagagttaatgcaaaacctccaccaggtgaccagtttaaacatcttataccactcatgtataaaggcttgccctggaatgtagtgcgtattaagatagtacaaatgctcagtgatacactgaaaggattgtcagacagagtcgtgttcgtcctttgggcgcatggctttgagcttacatcaatgaagtactttgtcaagattggacctgaaagaacgtgttgtctgtgtgacaaacgtgcaacttgcttttctacttcatcagatacttatgcctgctggaatcattctgtgggttttgactatgtctataacccatttatgattgatgttcagcagtggggctttacgggtaaccttcagagtaaccatgaccaacattgccaggtacatggaaatgcacatgtggctagttgtgatgctatcatgactagatgtttagcagtccatgagtgctttgttaagcgcgttgattggtctgttgaataccctattataggagatgaactgagggttaattctgcttgcagaaaagtacaacacatggttgtgaagtctgcattgcttgctgataagtttccagttcttcatgacattggaaatccaaaggctatcaagtgtgtgcctcaggctgaagtagaatggaagttctacgatgctcagccatgtagtgacaaagcttacaaaatagaggaactcttctattcttatgctacacatcacgataaattcactgatggtgtttgtttgttttggaattgtaacgttgatcgttacccagccaatgcaattgtgtgtaggtttgacacaagagtcttgtcaaacttgaacttaccaggctgtgatggtggtagtttgtatgtgaataagcatgcattccacactccagctttcgataaaagtgcatttactaatttaaagcaattgcctttcttttactattctgatagtccttgtgagtctcatggcaaacaagtagtgtcggatattgattatgttccactcaaatctgctacgtgtattacacgatgcaatttaggtggtgctgtttgcagacaccatgcaaatgagtaccgacagtacttggatgcatataatatgatgatttctgctggatttagcctatggatttacaaacaatttgatacttataacctgtggaatacatttaccaggttacagagtttagaaaatgtggcttataatgttgttaataaaggacactttgatggacacgccggcgaagcacctgtttccatcattaataatgctgtttacacaaaggtagatggtattgatgtggagatctttgaaaataagacaacacttcctgttaatgttgcatttgagctttgggctaagcgtaacattaaaccagtgccagagattaagatactcaataatttgggtgttgatatcgctgctaatactgtaatctgggactacaaaagagaagccccagcacatgtatctacaataggtgtctgcacaatgactgacattgccaagaaacctactgagagtgcttgttcttcacttactgtcttgtttgatggtagagtggaaggacaggtagacctttttagaaacgcccgtaatggtgttttaataacagaaggttcagtcaaaggtctaacaccttcaaagggaccagcacaagctagcgtcaatggagtcacattaattggagaatcagtaaaaacacagtttaactactttaagaaagtagacggcattattcaacagttgcctgaaacctactttactcagagcagagacttagaggattttaagcccagatcacaaatggaaactgactttctcgagctcgctatggatgaattcatacagcgatataagctcgagggctatgccttcgaacacatcgtttatggagatttcagtcatggacaacttggcggtcttcatttaatgataggcttagccaagcgctcacaagattcaccacttaaattagaggattttatccctatggacagcacagtgaaaaattacttcataacagatgcgcaaacaggttcatcaaaatgtgtgtgttctgtgattgatcttttacttgatgactttgtcgagataataaagtcacaagatttgtcagtgatttcaaaagtggtcaaggttacaattgactatgctgaaatttcattcatgctttggtgtaaggatggacatgttgaaaccttctacccaaaactacaagcaagtcaagcgtggcaaccaggtgttgcgatgcctaacttgtacaagatgcaaagaatgcttcttgaaaagtgtgaccttcagaattatggtgaaaatgctgttataccaaaaggaataatgatgaatgtcgcaaagtatactcaactgtgtcaatacttaaatacacttactttagctgtaccctacaacatgagagttattcactttggtgctggctctgataaaggagttgcaccaggtacagctgtgctcagacaatggttgccaactggcacactacttgtcgattcagatcttaatgacttcgtctccgacgcagattctactttaattggagactgtgcaacagtacatacggctaataaatgggaccttattattagcgatatgtatgaccctaggaccaaacatgtgacaaaagagaatgactctaaagaagggtttttcacttatctgtgtggatttataaagcaaaaactagccctgggtggttctatagctgtaaagataacagagcattcttggaatgctgacctttacaagcttatgggccatttctcatggtggacagcttttgttacaaatgtaaatgcatcatcatcggaagcatttttaattggggctaactatcttggcaagccgaaggaacaaattgatggctataccatgcatgctaactacattttctggaggaacacaaatcctatccagttgtcttcctattcactctttgacatgagcaaatttcctcttaaattaagaggaactgctgtaatgtctcttaaggagaatcaaatcaatgatatgatttattctcttctggaaaaaggtaggcttatcattagagaaaacaacagagttgtggtttcaagtgatattcttgttaacaactaaacgaacatgtttattttcttattatttcttactctcactagtggtagtgaccttgaccggtgcaccacttttgatgatgttcaagctcctaattacactcaacatacttcatctatgaggggggtttactatcctgatgaaatttttagatcagacactctttatttaactcaggatttatttcttccattttattctaatgttacagggtttcatactattaatcatacgtttggcaaccctgtcataccttttaaggatggtatttattttgctgccacagagaaatcaaatgttgtccgtggttgggtttttggttctaccatgaacaacaagtcacagtcggtgattattattaacaattctactaatgttgttatacgagcatgtaactttgaattgtgtgacaaccctttctttgctgtttctaaacccatgggtacacagacacatactatgatattcgataatgcatttaattgcactttcgagtacatatctgatgccttttcgcttgatgtttcagaaaagtcaggtaattttaaacacttacgagagtttgtgtttaaaaataaagatgggtttctctatgtttataagggctatcaacctatagatgtagttcgtgatctaccttctggttttaacactttgaaacctatttttaagttgcctcttggtattaacattacaaattttagagccattcttacagccttttcacctgctcaagacatttggggcacgtcagctgcagcctattttgttggctatttaaagccaactacatttatgctcaagtatgatgaaaatggtacaatcacagatgctgttgattgttctcaaaatccacttgctgaactcaaatgctctgttaagagctttgagattgacaaaggaatttaccagacctctaatttcagggttgttccctcaggagatgttgtgagattccctaatattacaaacttgtgtccttttggagaggtttttaatgctactaaattcccttctgtctatgcatgggagagaaaaaaaatttctaattgtgttgctgattactctgtgctctacaactcaacatttttttcaacctttaagtgctatggcgtttctgccactaagttgaatgatctttgcttctccaatgtctatgcagattcttttgtagtcaagggagatgatgtaagacaaatagcgccaggacaaactggtgttattgctgattataattataaattgccagatgatttcatgggttgtgtccttgcttggaatactaggaacattgatgctacttcaactggtaattataattataaatataggtatcttagacatggcaagcttaggccctttgagagagacatatctaatgtgcctttctcccctgatggcaaaccttgcaccccacctgctcttaattgttattggccattaaatgattatggtttttacaccactactggcattggctaccaaccttacagagttgtagtactttcttttgaacttttaaatgcaccggccacggtttgtggaccaaaattatccactgaccttattaagaaccagtgtgtcaattttaattttaatggactcactggtactggtgtgttaactccttcttcaaagagatttcaaccatttcaacaatttggccgtgatgtttctgatttcactgattccgttcgagatcctaaaacatctgaaatattagacatttcaccttgctcttttgggggtgtaagtgtaattacacctggaacaaatgcttcatctgaagttgctgttctatatcaagatgttaactgcactgatgtttctacagcaattcatgcagatcaactcacaccagcttggcgcatatattctactggaaacaatgtattccagactcaagcaggctgtcttataggagctgagcatgtcgacacttcttatgagtgcgacattcctattggagctggcatttgtgctagttaccatacagtttctttattacgtagtactagccaaaaatctattgtggcttatactatgtctttaggtgctgatagttcaattgcttactctaataacaccattgctatacctactaacttttcaattagcattactacagaagtaatgcctgtttctatggctaaaacctccgtagattgtaatatgtacatctgcggagattctactgaatgtgctaatttgcttctccaatatggtagcttttgcacacaactaaatcgtgcactctcaggtattgctgctgaacaggatcgcaacacacgtgaagtgttcgctcaagtcaaacaaatgtacaaaaccccaactttgaaatattttggtggttttaatttttcacaaatattacctgaccctctaaagccaactaagaggtcttttattgaggacttgctctttaataaggtgacactcgctgatgctggcttcatgaagcaatatggcgaatgcctaggtgatattaatgctagagatctcatttgtgcgcagaagttcaatggacttacagtgttgccacctctgctcactgatgatatgattgctgcctacactgctgctctagttagtggtactgccactgctggatggacatttggtgctggcgctgctcttcaaataccttttgctatgcaaatggcatataggttcaatggcattggagttacccaaaatgttctctatgagaaccaaaaacaaatcgccaaccaatttaacaaggcgattagtcaaattcaagaatcacttacaacaacatcaactgcattgggcaagctgcaagacgttgttaaccagaatgctcaagcattaaacacacttgttaaacaacttagctctaattttggtgcaatttcaagtgtgctaaatgatatcctttcgcgacttgataaagtcgaggcggaggtacaaattgacaggttaattacaggcagacttcaaagccttcaaacctatgtaacacaacaactaatcagggctgctgaaatcagggcttctgctaatcttgctgctactaaaatgtctgagtgtgttcttggacaatcaaaaagagttgacttttgtggaaagggctaccaccttatgtccttcccacaagcagccccgcatggtgttgtcttcctacatgtcacgtatgtgccatcccaggagaggaacttcaccacagcgccagcaatttgtcatgaaggcaaagcatacttccctcgtgaaggtgtttttgtgtttaatggcacttcttggtttattacacagaggaacttcttttctccacaaataattactacagacaatacatttgtctcaggaaattgtgatgtcgttattggcatcattaacaacacagtttatgatcctctgcaacctgagcttgactcattcaaagaagagctggacaagtacttcaaaaatcatacatcaccagatgttgatcttggcgacatttcaggcattaacgcttctgtcgtcaacattcaaaaagaaattgaccgcctcaatgaggtcgctaaaaatttaaatgaatcactcattgaccttcaagaattgggaaaatatgagcaatatattaaatggccttggtatgtttggctcggcttcattgctggactaattgccatcgtcatggttacaatcttgctttgttgcatgactagttgttgcagttgcctcaagggtgcatgctcttgtggttcttgctgcaagtttgatgaggatgactctgagccagttctcaagggtgtcaaattacattacacataaacgaacttatggatttgtttatgagattttttactcttggatcaattactgcacagccagtaaaaattgacaatgcttctcctgcaagtactgttcatgctacagcaacgataccgctacaagcctcactccctttcggatggcttgttattggcgttgcatttcttgctgtttttcagagcgctaccaaaataattgcgctcaataaaagatggcagctagccctttataagggcttccagttcatttgcaatttactgctgctatttgttaccatctattcacatcttttgcttgtcgctgcaggtatggaggcgcaatttttgtacctctatgccttgatatattttctacaatgcatcaacgcatgtagaattattatgagatgttggctttgttggaagtgcaaatccaagaacccattactttatgatgccaactactttgtttgctggcacacacataactatgactactgtataccatataacagtgtcacagatacaattgtcgttactgaaggtgacggcatttcaacaccaaaactcaaagaagactaccaaattggtggttattctgaggataggcactcaggtgttaaagactatgtcgttgtacatggctatttcaccgaagtttactaccagcttgagtctacacaaattactacagacactggtattgaaaatgctacattcttcatctttaacaagcttgttaaagacccaccgaatgtgcaaatacacacaatcgacggctcttcaggagttgctaatccagcaatggatccaatttatgatgagccgacgacgactactagcgtgcctttgtaagcacaagaaagtgagtacgaacttatgtactcattcgtttcggaagaaacaggtacgttaatagttaatagcgtacttctttttcttgctttcgtggtattcttgctagtcacactagccatccttactgcgcttcgattgtgtgcgtactgctgcaatattgttaacgtgagtttagtaaaaccaacggtttacgtctactcgcgtgttaaaaatctgaactcttctgaaggagttcctgatcttctggtctaaacgaactaactattattattattctgtttggaactttaacattgcttatcatggcagacaacggtactattaccgttgaggagcttaaacaactcctggaacaatggaacctagtaataggtttcctatgcctagcctggattatgttactacaatttgcctattctaatcggaacaggtttttgtacataataaagcttgttttcctctggctcttgtggccagtaacacttgcttgttttgtgcttgctgctgtctacagaattaattgggtgactggcgggattgcgattgcaatggcttgtattgtaggcttgatgtggcttagctacttcgttgcttccttcaggctgtttgctcgtacccgctcaatgtggtcattcaacccagaaacaaacattcttctcaatgtgcctctccgggggacaattgtgaccagaccgctcatggaaagtgaacttgtcattggtgctgtgatcattcgtggtcacttgcgaatggccggacactccctagggcgctgtgacattaaggacctgccaaaagagatcactgtggctacatcacgaacgctttcttattacaaattaggagcgtcgcagcgtgtaggcactgattcaggttttgctgcatacaaccgctaccgtattggaaactataaattaaatacagaccacgccggtagcaacgacaatattgctttgctagtacagtaagtgacaacagatgtttcatcttgttgacttccaggttacaatagcagagatattgattatcattatgaggactttcaggattgctatttggaatcttgacgttataataagttcaatagtgagacaattatttaagcctctaactaagaagaattattcggagttagatgatgaagaacctatggagttagattatccataaaacgaacatgaaaattattctcttcctgacattgattgtatttacatcttgcgagctatatcactatcaggagtgtgttagaggtacgactgtactactaaaagaaccttgcccatcaggaacatacgagggcaattcaccatttcaccctcttgctgacaataaatttgcactaacttgcactagcacacactttgcttttgcttgtgctgacggtactcgacatacctatcagctgcgtgcaagatcagtttcaccaaaacttttcatcagacaagaggaggttcaacaagagctctactcgccactttttctcattgttgctgctctagtatttttaatactttgcttcaccattaagagaaagacagaatgaatgagctcactttaattgacttctatttgtgctttttagcctttctgctattccttgttttaataatgcttattatattttggttttcactcgaaatccaggatctagaagaaccttgtaccaaagtctaaacgaacatgaaacttctcattgttttgacttgtatttctctatgcagttgcatatgcactgtagtacagcgctgtgcatctaataaacctcatgtgcttgaagatccttgtaaggtacaacactaggggtaatacttatagcactgcttggctttgtgctctaggaaaggttttaccttttcatagatggcacactatggttcaaacatgcacacctaatgttactatcaactgtcaagatccagctggtggtgcgcttatagctaggtgttggtaccttcatgaaggtcaccaaactgctgcatttagagacgtacttgttgttttaaataaacgaacaaattaaaatgtctgataatggaccccaatcaaaccaacgtagtgccccccgcattacatttggtggacccacagattcaactgacaataaccagaatggaggacgcaatggggcaaggccaaaacagcgccgaccccaaggtttacccaataatactgcgtcttggttcacagctctcactcagcatggcaaggaggaacttagattccctcgaggccagggcgttccaatcaacaccaatagtggtccagatgaccaaattggctactaccgaagagctacccgacgagttcgtggtggtgacggcaaaatgaaagagctcagccccagatggtacttctattacctaggaactggcccagaagcttcacttccctacggcgctaacaaagaaggcatcgtatgggttgcaactgagggagccttgaatacacccaaagaccacattggcacccgcaatcctaataacaatgctgccaccgtgctacaacttcctcaaggaacaacattgccaaaaggcttctacgcagagggaagcagaggcggcagtcaagcctcttctcgctcctcatcacgtagtcgcggtaattcaagaaattcaactcctggcagcagtaggggaaattctcctgctcgaatggctagcggaggtggtgaaactgccctcgcgctattgctgctagacagattgaaccagcttgagagcaaagtttctggtaaaggccaacaacaacaaggccaaactgtcactaagaaatctgctgctgaggcatctaaaaagcctcgccaaaaacgtactgccacaaaacagtacaacgtcactcaagcatttgggagacgtggtccagaacaaacccaaggaaatttcggggaccaagacctaatcagacaaggaactgattacaaacattggccgcaaattgcacaatttgctccaagtgcctctgcattctttggaatgtcacgcattggcatggaagtcacaccttcgggaacatggctgacttatcatggagccattaaattggatgacaaagatccacaattcaaagacaacgtcatactgctgaacaagcacattgacgcatacaaaacattcccaccaacagagcctaaaaaggacaaaaagaaaaagactgatgaagctcagcctttgccgcagagacaaaagaagcagcccactgtgactcttcttcctgcggctgacatggatgatttctccagacaacttcaaaattccatgagtggagcttctgctgattcaactcaggcataaacactcatgatgaccacacaaggcagatgggctatgtaaacgttttcgcaattccgtttacgatacatagtctactcttgtgcagaatgaattctcgtaactaaacagcacaagtaggtttagttaactttaatctcacatagcaatctttaatcaatgtgtaacattagggaggacttgaaagagccaccacattttcatcgaggccacgcggagtacgatcgagggtacagtgaataatgctagggagagctgcctatatggaagagccctaatgtgtaaaattaattttagtagtgctatccccatgtgattttaatagcttcttaggagaatgacaa

SEQ ID NO: 29828 - DNA, 29729 bp, SARS Coronavirus
atattaggtttttacctacccaggaaaagccaaccaacctcgatctcttgtagatctgttctctaaacgaactttaaaatctgtgtagctgtcgctcggctgcatgcctagtgcacctacgcagtataaacaataataaattttactgtcgttgacaagaaacgagtaactcgtccctcttctgcagactgcttacggtttcgtccgtgttgcagtcgatcatcagcatacctaggtttcgtccgggtgtgaccgaaaggtaagatggagagccttgttcttggtgtcaacgagaaaacacacgtccaactcagtttgcctgtccttcaggttagagacgtgctagtgcgtggcttcggggactctgtggaagaggccctatcggaggcacgtgaacacctcaaaaatggcacttgtggtctagtagagctggaaaaaggcgtactgccccagcttgaacagccctatgtgttcattaaacgttctgatgccttaagcaccaatcacggccacaaggtcgttgagctggttgcagaaatggacggcattcagtacggtcgtagcggtataacactgggagtactcgtgccacatgtgggcgaaaccccaattgcataccgcaatgttcttcttcgtaagaacggtaataagggagccggtggtcatagctatggcatcgatctaaagtcttatgacttaggtgacgagcttggcactgatcccattgaagattatgaacaaaactggaacactaagcatggcagtggtgcactccgtgaactcactcgtgagctcaatggaggtgcagtcactcgctatgtcgacaacaatttctgtggcccagatgggtaccctcttgattgcatcaaagattttctcgcacgcgcgggcaagtcaatgtgcactctttccgaacaacttgattacatcgagtcgaagagaggtgtctactgctgccgtgaccatgagcatgaaattgcctggttcactgagcgctctgataagagctacgagcaccagacacccttcgaaattaagagtgccaagaaatttgacactttcaaaggggaatgcccaaagtttgtgtttcctcttaactcaaaagtcaaagtcattcaaccacgtgttgaaaagaaaaagactgagggtttcatggggcgtatacgctctgtgtaccctgttgcatctccacaggagtgtaacaatatgcacttgtctaccttgatgaaatgtaatcattgcgatgaagtttcatggcagacgtgcgactttctgaaagccacttgtgaacattgtggcactgaaaatttagttattgaaggacctactacatgtgggtacctacctactaatgctgtagtgaaaatgccatgtcctgcctgtcaagacccagagattggacctgagcatagtgttgcagattatcacaaccactcaaacattgaaactcgactccgcaagggaggtaggactagatgttttggaggctgtgtgtttgcctatgttggctgctataataagcgtgcctactgggttcctcgtgctagtgctgatattggctcaggccatactggcattactggtgacaatgtggagaccttgaatgaggatctccttgagatactgagtcgtgaacgtgttaacattaacattgttggcgattttcatttgaatgaagaggttgccatcattttggcatctttctctgcttctacaagtgcctttattgacactataaagagtcttgattacaagtctttcaaaaccattgttgagtcctgtggtaactataaagttaccaagggaaagcccgtaaaaggtgcttggaacattggacaacagagatcagttttaacaccactgtgtggttttccctcacaggctgctggtgttatcagatcaatttttgcgcgcacacttgatgcagcaaaccactcaattcctgatttgcaaagagcagctgtcaccatacttgatggtatttctgaacagtcattacgtcttgtcgacgccatggtttatacttcagacctgctcaccaacagtgtcattattatggcatatgtaactggtggtcttgtacaacagacttctcagtggttgtctaatcttttgggcactactgttgaaaaactcaggcctatctttgaatggattgaggcgaaacttagtgcaggagttgaatttctcaaggatgcttgggagattctcaaatttctcattacaggtgtttttgacatcgtcaagggtcaaatacaggttgcttcagataacatcaaggattgtgtaaaatgcttcattgatgttgttaacaaggcactcgaaatgtgcattgatcaagtcactatcgctggcgcaaagttgcgatcactcaacttaggtgaagtcttcatcgctcaaagcaagggactttaccgtcagtgtatacgtggcaaggagcagctgcaactactcatgcctcttaaggcaccaaaagaagtaacctttcttgaaggtgattcacatgacacagtacttacctctgaggaggttgttctcaagaacggtgaactcgaagcactcgagacgcccgttgatagcttcacaaatggagctatcgttggcacaccagtctgtgtaaatggcctcatgctcttagagattaaggacaaagaacaatactgcgcattgtctcctggtttactggctacaaacaatgtctttcgcttaaaagggggtgcaccaattaaaggtgtaacctttggagaagatactgtttgggaagttcaaggttacaagaatgtgagaatcacatttgagcttgatgaacgtgttgacaaagtgcttaatgaaaagtgctctgtctacactgttgaatccggtaccgaagttactgagtttgcatgtgttgtagcagaggctgttgtgaagactttacaaccagtttctgatctccttaccaacatgggtattgatcttgatgagtggagtgtagctacattctacttatttgatgatgctggtgaagaaaacttttcatcacgtatgtattgttccttttaccctccagatgaggaagaagaggacgatgcagagtgtgaggaagaagaaattgatgaaacctgtgaacatgagtacggtacagaggatgattatcaaggtctccctctggaatttggtgcctcagctgaaacagttcgagttgaggaagaagaagaggaagactggctggatgatactactgagcaatcagagattgagccagaaccagaacctacacctgaagaaccagttaatcagtttactggttatttaaaacttactgacaatgttgccattaaatgtgttgacatcgttaaggaggcacaaagtgctaatcctatggtgattgtaaatgctgctaacatacacctgaaacatggtggtggtgtagcaggtgcactcaacaaggcaaccaatggtgccatgcaaaaggagagtgatgattacattaagctaaatggccctcttacagtaggagggtcttgtttgctttctggacataatcttgctaagaagtgtctgcatgttgttggacctaacctaaatgcaggtgaggacatccagcttcttaaggcagcatatgaaaatttcaattcacaggacatcttacttgcaccattgttgtcagcaggcatatttggtgctaaaccacttcagtctttacaagtgtgcgtgcagacggttcgtacacaggtttatattgcagtcaatgacaaagctctttatgagcaggttgtcatggattatcttgataacctgaagcctagagtggaagcacctaaacaagaggagccaccaaacacagaagattccaaaactgaggagaaatccgtcgtacagaagcctgtcgatgtgaagccaaaaattaaggcctgcattgatgaggttaccacaacactggaagaaactaagtttcttaccaataagttactcttgtttgctgatatcaatggtaagctttaccatgattctcagaacatgcttagaggtgaagatatgtctttccttgagaaggatgcaccttacatggtaggtgatgttatcactagtggtgatatcacttgtgttgtaataccctccaaaaaggctggtggcactactgagatgctctcaagagctttgaagaaagtgccagttgatgagtatataaccacgtaccctggacaaggatgtgctggttatacacttgaggaagctaagactgctcttaagaaatgcaaatctgcattttatgtactaccttcagaagcacctaatgctaaggaagagattctaggaactgtatcctggaatttgagagaaatgcttgctcatgctgaagagacaagaaaattaatgcctatatgcatggatgttagagccataatggcaaccatccaacgtaagtataaaggaattaaaattcaagagggcatcgttgactatggtgtccgattcttcttttatactagtaaagagcctgtagcttctattattacgaagctgaactctctaaatgagccgcttgtcacaatgccaattggttatgtgacacatggttttaatcttgaagaggctgcgcgctgtatgcgttctcttaaagctcctgccgtagtgtcagtatcatcaccagatgctgttactacatataatggatacctcacttcgtcatcaaagacatctgaggagcactttgtagaaacagtttctttggctggctcttacagagattggtcctattcaggacagcgtacagagttaggtgttgaatttcttaagcgtggtgacaaaattgtgtaccacactctggagagccccgtcgagtttcatcttgacggtgaggttctttcacttgacaaactaaagagtctcttatccctgcgggaggttaagactataaaagtgttcacaactgtggacaacactaatctccacacacagcttgtggatatgtctatgacatatggacagcagtttggtccaacatacttggatggtgctgatgttacaaaaattaaacctcatgtaaatcatgagggtaagactttctttgtactacctagtgatgacacactacgtagtgaagctttcgagtactaccatactcttgatgagagttttcttggtaggtacatgtctgctttaaaccacacaaagaaatggaaatttcctcaagttggtggtttaacttcaattaaatgggctgataacaattgttatttgtctagtgttttattagcacttcaacagcttgaagtcaaattcaatgcaccagcacttcaagaggcttattatagagcccgtgctggtgatgctgctaacttttgtgcactcatactcgcttacagtaataaaactgttggcgagcttggtgatgtcagagaaactatgacccatcttctacagcatgctaatttggaatctgcaaagcgagttcttaatgtggtgtgtaaacattgtggtcagaaaactactaccttaacgggtgtagaagctgtgatgtatatgggtactctatcttatgataatcttaagacaggtgtttccattccatgtgtgtgtggtcgtgatgctacacaatatctagtacaacaagagtcttcttttgttatgatgtctgcaccacctgctgagtataaattacagcaaggtacattcttatgtgcgaatgagtacactggtaactatcagtgtggtcattacactcatataactgctaaggagaccctctatcgtattgacggagctcaccttacaaagatgtcagagtacaaaggaccagtgactgatgttttctacaaggaaacatcttacactacaaccatcaagcctgtgtcgtataaactcgatggagttacttacacagagattgaaccaaaattggatgggtattataaaaaggataatgcttactatacagagcagcctatagaccttgtaccaactcaaccattaccaaatgcgagttttgataatttcaaactcacatgttctaacacaaaatttgctgatgatttaaatcaaatgacaggcttcacaaagccagcttcacgagagctatctgtcacattcttcccagacttgaatggcgatgtagtggctattgactatagacactattcagcgagtttcaagaaaggtgctaaattactgcataagccaattgtttggcacattaaccaggctacaaccaagacaacgttcaaaccaaacacttggtgtttacgttgtctttggagtacaaagccagtagatacttcaaattcatttgaagttctggcagtagaagacacacaaggaatggacaatcttgcttgtgaaagtcaacaacccacctctgaagaagtagtggaaaatcctaccatacagaaggaagtcatagagtgtgacgtgaaaactaccgaagttgtaggcaatgtcatacttaaaccatcagatgaaggtgttaaagtaacacaagagttaggtcatgaggatcttatggctgcttatgtggaaaacacaagcattaccattaagaaacctaatgagctttcactagccttaggtttaaaaacaattgccactcatggtattgctgcaattaatagtgttccttggagtaaaattttggcttatgtcaaaccattcttaggacaagcagcaattacaacatcaaattgcgctaagagattagcacaacgtgtgtttaacaattatatgccttatgtgtttacattattgttccaattgtgtacttttactaaaagtaccaattctagaattagagcttcactacctacaactattgctaaaaatagtgttaagagtgttgctaaattatgtttggatgccggcattaattatgtgaagtcacccaaattttctaaattgttcacaatcgctatgtggctattgttgttaagtatttgcttaggttctctaatctgtgtaactgctgcttttggtgtactcttatctaattttggtgctccttcttattgtaatggcgttagagaattgtatcttaattcgtctaacgttactactatggatttctgtgaaggttcttttccttgcagcatttgtttaagtggattagactcccttgattcttatccagctcttgaaaccattcaggtgacgatttcatcgtacaagctagacttgacaattttaggtctggccgctgagtgggttttggcatatatgttgttcacaaaattcttttatttattaggtctttcagctataatgcaggtgttctttggctattttgctagtcatttcatcagcaattcttggctcatgtggtttatcattagtattgtacaaatggcacccgtttctgcaatggttaggatgtacatcttctttgcttctttctactacatatggaagagctatgttcatatcatggatggttgcacctcttcgacttgcatgatgtgctataagcgcaatcgtgccacacgcgttgagtgtacaactattgttaatggcatgaagagatctttctatgtctatgcaaatggaggccgtggcttctgcaagactcacaattggaattgtctcaattgtgacacattttgcactggtagtacattcattagtgatgaagttgctcgtgatttgtcactccagtttaaaagaccaatcaaccctactgaccagtcatcgtatattgttgatagtgttgctgtgaaaaatggcgcgcttcacctctactttgacaaggctggtcaaaagacctatgagagacatccgctctcccattttgtcaatttagacaatttgagagctaacaacactaaaggttcactgcctattaatgtcatagtttttgatggcaagtccaaatgcgacgagtctgcttctaagtctgcttctgtgtactacagtcagctgatgtgccaacctattctgttgcttgaccaagctcttgtatcagacgttggagatagtactgaagtttccgttaagatgtttgatgcttatgtcgacaccttttcagcaacttttagtgttcctatggaaaaacttaaggcacttgttgctacagctcacagcgagttagcaaagggtgtagctttagatggtgtcctttctacattcgtgtcagctgcccgacaaggtgttgttgataccgatgttgacacaaaggatgttattgaatgtctcaaactttcacatcactctgacttagaagtgacaggtgacagttgtaacaatttcatgctcacctataataaggttgaaaacatgacgcccagagatcttggcgcatgtattgactgtaatgcaaggcatatcaatgcccaagtagcaaaaagtcacaatgtttcactcatctggaatgtaaaagactacatgtctttatctgaacagctgcgtaaacaaattcgtagtgctgccaagaagaacaacataccttttagactaacttgtgctacaactagacaggttgtcaatgtcataactactaaaatctcactcaagggtggtaagattgttagtacttgttttaaacttatgcttaaggccacattattgtgcgttcttgctgcattggtttgttatatcgttatgccagtacatacattgtcaatccatgatggttacacaaatgaaatcattggttacaaagccattcaggatggtgtcactcgtgacatcatttctactgatgattgttttgcaaataaacatgctggttttgacgcatggtttagccagcgtggtggttcatacaaaaatgacaaaagctgccctgtagtagctgctatcattacaagagagattggtttcatagtgcctggcttaccgggtactgtgctgagagcaatcaatggtgacttcttgcattttctacctcgtgtttttagtgctgttggcaacatttgctacacaccttccaaactcattgagtatagtgattttgctacctctgcttgcgttcttgctgctgagtgtacaatttttaaggatgctatgggcaaacctgtgccatattgttatgacactaatttgctagagggttctatttcttatagtgagcttcgtccagacactcgttatgtgcttatggatggttccatcatacagtttcctaacacttacctggagggttctgttagagtagtaacaacttttgatgctgagtactgtagacatggtacatgcgaaaggtcagaagtaggtatttgcctatctaccagtggtagatgggttcttaataatgagcattacagagctctatcaggagttttctgtggtgttgatgcgatgaatctcatagctaacatctttactcctcttgtgcaacctgtgggtgctttagatgtgtctgcttcagtagtggctggtggtattattgccatattggtgacttgtgctgcctactactttatgaaattcagacgtgtttttggtgagtacaaccatgttgttgctgctaatgcacttttgtttttgatgtctttcactatactctgtctggtaccagcttacagctttctgccgggagtctactcagtcttttacttgtacttgacattctatttcaccaatgatgtttcattcttggctcaccttcaatggtttgccatgttttctcctattgtgcctttttggataacagcaatctatgtattctgtatttctctgaagcactgccattggttctttaacaactatcttaggaaaagagtcatgtttaatggagttacatttagtaccttcgaggaggctgctttgtgtacctttttgctcaacaaggaaatgtacctaaaattgcgtagcgagacactgttgccacttacacagtataacaggtatcttgctctatataacaagtacaagtatttcagtggagccttagatactaccagctatcgtgaagcagcttgctgccacttagcaaaggctctaaatgactttagcaactcaggtgctgatgttctctaccaaccaccacagacatcaatcacttctgctgttctgcagagtggttttaggaaaatggcattcccgtcaggcaaagttgaagggtgcatggtacaagtaacctgtggaactacaactcttaatggattgtggttggatgacacagtatactgtccaagacatgtcatttgcacagcagaagacatgcttaatcctaactatgaagatctgctcattcgcaaatccaaccatagctttcttgttcaggctggcaatgttcaacttcgtgttattggccattctatgcaaaattgtctgcttaggcttaaagttgatacttctaaccctaagacacccaagtataaatttgtccgtatccaacctggtcaaacattttcagttctagcatgctacaatggttcaccatctggtgtttatcagtgtgccatgagacctaatcataccattaaaggttctttccttaatggatcatgtggtagtgttggttttaacattgattatgattgcgtgtctttctgctatatgcatcatatggagcttccaacaggagtacacgctggtactgacttagaaggtaaattctatggtccatttgttgacagacaaactgcacaggctgcaggtacagacacaaccataacattaaatgttttggcatggctgtatgctgctgttatcaatggtgataggtggtttcttaatagattcaccactactttgaatgactttaaccttgtggcaatgaagtacaactatgaacctttgacacaagatcatgttgacatattgggacctctttctgctcaaacaggaattgccgtcttagatatgtgtgctgctttgaaagagctgctgcagaatggtatgaatggtcgtactatccttggtagcactattttagaagatgagtttacaccatttgatgttgttagacaatgctctggtgttaccttccaaggtaagttcaagaaaattgttaagggcactcatcattggatgcttttaactttcttgacatcactattgattcttgttcaaagtacacagtggtcactgtttttctttgtttacgagaatgctttcttgccatttactcttggtattatggcaattgctgcatgtgctatgctgcttgttaagcataagcacgcattcttgtgcttgtttctgttaccttctcttgcaacagttgcttactttaatatggtctacatgcctgctagctgggtgatgcgtatcatgacatggcttgaattggctgacactagcttgtctggttataggcttaaggattgtgttatgtatgcttcagctttagttttgcttattctcatgacagctcgcactgtttatgatgatgctgctagacgtgtttggacactgatgaatgtcattacacttgtttacaaagtctactatggtaatgctttagatcaagctatttccatgtgggccttagttatttctgtaacctctaactattctggtgtcgttacgactatcatgtttttagctagagctatagtgtttgtgtgtgttgagtattatccattgttatttattactggcaacaccttacagtgtatcatgcttgtttattgtttcttaggctattgttgctgctgctactttggccttttctgtttactcaaccgttacttcaggcttactcttggtgtttatgactacttggtctctacacaagaatttaggtatatgaactcccaggggcttttgcctcctaagagtagtattgatgctttcaagcttaacattaagttgttgggtattggaggtaaaccatgtatcaaggttgctactgtacagtctaaaatgtctgacgtaaagtgcacatctgtggtactgctctcggttcttcaacaacttagagtagagtcatcttctaaattgtgggcacaatgtgtacaactccacaatgatattcttcttgcaaaagacacaactgaagctttcgagaagatggtttctcttttgtctgttttgctatccatgcagggtgctgtagacattaataggttgtgcgaggaaatgctcgataaccgtgctactcttcaggctattgcttcagaatttagttctttaccatcatatgccgcttatgccactgcccaggaggcctatgagcaggctgtagctaatggtgattctgaagtcgttctcaaaaagttaaagaaatctttgaatgtggctaaatctgagtttgaccgtgatgctgccatgcaacgcaagttggaaaagatggcagatcaggctatgacccaaatgtacaaacaggcaagatctgaggacaagagggcaaaagtaactagtgctatgcaaacaatgctcttcactatgcttaggaagcttgataatgatgcacttaacaacattatcaacaatgcgcgtgatggttgtgttccactcaacatcataccattgactacagcagccaaactcatggttgttgtccctgattatggtacctacaagaacacttgtgatggtaacacctttacatatgcatctgcactctgggaaatccagcaagttgttgatgcggatagcaagattgttcaacttagtgaaattaacatggacaattcaccaaatttggcttggcctcttattgttacagctctaagagccaactcagctgttaaactacagaataatgaactgagtccagtagcactacgacagatgtcctgtgcggctggtaccacacaaacagcttgtactgatgacaatgcacttgcctactataacaattcgaagggaggtaggtttgtgctggcattactatcagaccaccaagatctcaaatgggctagattccctaagagtgatggtacaggtacaatttacacagaactggaaccaccttgtaggtttgttacagacacaccaaaagggcctaaagtgaaatacttgtacttcatcaaaggcttaaacaacctaaatagaggtatggtgctgggcagtttagctgctacagtacgtcttcaggctggaaatgctacagaagtacctgccaattcaactgtgctttccttctgtgcttttgcagtagaccctgctaaagcatataaggattacctagcaagtggaggacaaccaatcaccaactgtgtgaagatgttgtgtacacacactggtacaggacaggcaattactgtaacaccagaagctaacatggaccaagagtcctttggtggtgcttcatgttgtctgtattgtagatgccacattgaccatccaaatcctaaaggattctgtgacttgaaaggtaagtacgtccaaatacctaccacttgtgctaatgacccagtgggttttacacttagaaacacagtctgtaccgtctgcggaatgtggaaaggttatggctgtagttgtgaccaactccgcgaacccttgatgcagtctgcggatgcatcaacgtttttaaacgggtttgcggtgtaagtgcagcccgtcttacaccgtgcggcacaggcactagtactgatgtcgtctacagggcttttgatatttacaacgaaaaagttgctggttttgcaaagttcctaaaaactaattgctgtcgcttccaggagaaggatgaggaaggcaatttattagactcttactttgtagttaagaggcatactatgtctaactaccaacatgaagagactatttataacttggttaaagattgtccagcggttgctgtccatgactttttcaagtttagagtagatggtgacatggtaccacatatatcacgtcagcgtctaactaaatacacaatggctgatttagtctatgctctacgtcattttgatgagggtaattgtgatacattaaaagaaatactcgtcacatacaattgctgtgatgatgattatttcaataagaaggattggtatgacttcgtagagaatcctgacatcttacgcgtatatgctaacttaggtgagcgtgtacgccaatcattattaaagactgtacaattctgcgatgctatgcgtgatgcaggcattgtaggcgtactgacattagataatcaggatcttaatgggaactggtacgatttcggtgatttcgtacaagtagcaccaggctgcggagttcctattgtggattcatattactcattgctgatgcccatcctcactttgactagggcattggctgctgagtcccatatggatgctgatctcgcaaaaccacttattaagtgggatttgctgaaatatgattttacggaagagagactttgtctcttcgaccgttattttaaatattgggaccagacataccatcccaattgtattaactgtttggatgataggtgtatccttcattgtgcaaactttaatgtgttattttctactgtgtttccacctacaagttttggaccactagtaagaaaaatatttgtagatggtgttccttttgttgtttcaactggataccattttcgtgagttaggagtcgtacataatcaggatgtaaacttacatagctcgcgtctcagtttcaaggaacttttagtgtatgctgctgatccagctatgcatgcagcttctggcaatttattgctagataaacgcactacatgcttttcagtagctgcactaacaaacaatgttgcttttcaaactgtcaaacccggtaattttaataaagacttttatgactttgctgtgtctaaaggtttctttaaggaaggaagttctgttgaactaaaacacttcttctttgctcaggatggcaacgctgctatcagtgattatgactattatcgttataatctgccaacaatgtgtgatatcagacaactcctattcgtagttgaagttgttgataaatactttgattgttacgatggtggctgtattaatgccaaccaagtaatcgttaacaatctggataaatcagctggtttcccatttaataaatggggtaaggctagactttattatgactcaatgagttatgaggatcaagatgcacttttcgcgtatactaagcgtaatgtcatccctactataactcaaatgaatcttaagtatgccattagtgcaaagaatagagctcgcaccgtagctggtgtctctatctgtagtactatgacaaatagacagtttcatcagaaattattgaagtcaatagccgccactagaggagctactgtggtaattggaacaagcaagttttacggtggctggcataatatgttaaaaactgtttacagtgatgtagaaactccacaccttatgggttgggattatccaaaatgtgacagagccatgcctaacatgcttaggataatggcctctcttgttcttgctcgcaaacataacacttgctgtaacttatcacaccgtttctacaggttagctaacgagtgtgcgcaagtattaagtgagatggtcatgtgtggcggctcactatatgttaaaccaggtggaacatcatccggtgatgctacaactgcttatgctaatagtgtctttaacatttgtcaagctgttacagccaatgtaaatgcacttctttcaactgatggtaataagatagctgacaagtatgtccgcaatctacaacacaggctctatgagtgtctctatagaaatagggatgttgatcatgaattcgtggatgagttttacgcttacctgcgtaaacatttctccatgatgattctttctgatgatgccgttgtgtgctataacagtaactatgcggctcaaggtttagtagctagcattaagaactttaaggcagttctttattatcaaaataatgtgttcatgtctgaggcaaaatgttggactgagactgaccttactaaaggacctcacgaattttgctcacagcatacaatgctagttaaacaaggagatgattacgtgtacctgccttacccagatccatcaagaatattaggcgcaggctgttttgtcgatgatattgtcaaaacagatggtacacttatgattgaaaggttcgtgtcactggctattgatgcttacccacttacaaaacatcctaatcaggagtatgctgatgtctttcacttgtatttacaatacattagaaagttacatgatgagcttactggccacatgttggacatgtattccgtaatgctaactaatgataacacctcacggtactgggaacctgagttttatgaggctatgtacacaccacatacagtcttgcaggctgtaggtgcttgtgtattgtgcaattcacagacttcacttcgttgcggtgcctgtattaggagaccattcctatgttgcaagtgctgctatgaccatgtcatttcaacatcacacaaattagtgttgtctgttaatccctatgtttgcaatgccccaggttgtgatgtcactgatgtgacacaactgtatctaggaggtatgagctattattgcaagtcacataagcctcccattagttttccattatgtgctaatggtcaggtttttggtttatacaaaaacacatgtgtaggcagtgacaatgtcactgacttcaatgcgatagcaacatgtgattggactaatgctggcgattacatacttgccaacacttgtactgagagactcaagcttttcgcagcagaaacgctcaaagccactgaggaaacatttaagctgtcatatggtattgccactgtacgcgaagtactctctgacagagaattgcatctttcatgggaggttggaaaacctagaccaccattgaacagaaactatgtctttactggttaccgtgtaactaaaaatagtaaagtacagattggagagtacacctttgaaaaaggtgactatggtgatgctgttgtgtacagaggtactacgacatacaagttgaatgttggtgattactttgtgttgacatctcacactgtaatgccacttagtgcacctactctagtgccacaagagcactatgtgagaattactggcttgtacccaacactcaacatctcagatgagttttctagcaatgttgcaaattatcaaaaggtcggcatgcaaaagtactctacactccaaggaccacctggtactggtaagagtcattttgccatcggacttgctctctattacccatctgctcgcatagtgtatacggcatgctctcatgcagctgttgatgccctatgtgaaaaggcattaaaatatttgcccatagataaatgtagtagaatcatacctgcgcgtgcgcgcgtagagtgttttgataaattcaaagtgaattcaacactagaacagtatgttttctgcactgtaaatgcattgccagaaacaactgctgacattgtagtctttgatgaaatctctatggctactaattatgacttgagtgttgtcaatgctagacttcgtgcaaaacactacgtctatattggcgatcctgctcaattaccagccccccgcacattgctgactaaaggcacactagaaccagaatattttaattcagtgtgcagacttatgaaaacaataggtccagacatgttccttggaacttgtcgccgttgtcctgctgaaattgttgacactgtgagtgctttagtttatgacaataagctaaaagcacacaaggataagtcagctcaatgcttcaaaatgttctacaaaggtgttattacacatgatgtttcatctgcaatcaacagacctcaaataggcgttgtaagagaatttcttacacgcaatcctgcttggagaaaagctgtttttatctcaccttataattcacagaacgctgtagcttcaaaaatcttaggattgcctacgcagactgttgattcatcacagggttctgaatatgactatgtcatattcacacaaactactgaaacagcacactcttgtaatgtcaaccgcttcaatgtggctatcacaagggcaaaaattggcattttgtgcataatgtctgatagagatctttatgacaaactgcaatttacaagtctagaaataccacgtcgcaatgtggctacattacaagcagaaaatgtaactggactttttaaggactgtagtaagatcattactggtcttcatcctacacaggcacctacacacctcagcgttgatataaagttcaagactgaaggattatgtgttgacataccaggcataccaaaggacatgacctaccgtagactcatctctatgatgggtttcaaaatgaattaccaagtcaatggttaccctaatatgtttatcacccgcgaagaagctattcgtcacgttcgtgcgtggattggctttgatgtagagggctgtcatgcaactagagatgctgtgggtactaacctacctctccagctaggattttctacaggtgttaacttagtagctgtaccgactggttatgttgacactgaaaataacacagaattcaccagagttaatgcaaaacctccaccaggtgaccagtttaaacatcttataccactcatgtataaaggcttgccctggaatgtagtgcgtattaagatagtacaaatgctcagtgatacactgaaaggattgtcagacagagtcgtgttcgtcctttgggcgcatggctttgagcttacatcaatgaagtactttgtcaagattggacctgaaagaacgtgttgtctgtgtgacaaacgtgcaacttgcttttctacttcatcagatacttatgcctgctggaatcattctgtgggttttgactatgtctataacccatttatgattgatgttcagcagtggggctttacgggtaaccttcagagtaaccatgaccaacattgccaggtacatggaaatgcacatgtggctagttgtgatgctatcatgactagatgtttagcagtccatgagtgctttgttaagcgcgttgattggtctgttgaataccctattataggagatgaactgagggttaattctgcttgcagaaaagtacaacacatggttgtgaagtctgcattgcttgctgataagtttccagttcttcatgacattggaaatccaaaggctatcaagtgtgtgcctcaggctgaagtagaatggaagttctacgatgctcagccatgtagtgacaaagcttacaaaatagaggaactcttctattcttatgctacacatcacgataaattcactgatggtgtttgtttgttttggaattgtaacgttgatcgttacccagccaatgcaattgtgtgtaggtttgacacaagagtcttgtcaaacttgaacttaccaggctgtgatggtggtagtttgtatgtgaataagcatgcattccacactccagctttcgataaaagtgcatttactaatttaaagcaattgcctttcttttactattctgatagtccttgtgagtctcatggcaaacaagtagtgtcggatattgattatgttccactcaaatctgctacgtgtattacacgatgcaatttaggtggtgctgtttgcagacaccatgcaaatgagtaccgacagtacttggatgcatataatatgatgatttctgctggatttagcctatggatttacaaacaatttgatacttataacctgtggaatacatttaccaggttacagagtttagaaaatgtggcttataatgttgttaataaaggacactttgatggacacgccggcgaagcacctgtttccatcattaataatgctgtttacacaaaggtagatggtattgatgtggagatctttgaaaataagacaacacttcctgttaatgttgcatttgagctttgggctaagcgtaacattaaaccagtgccagagattaagatactcaataatttgggtgttgatatcgctgctaatactgtaatctgggactacaaaagagaagccccagcacatgtatctacaataggtgtctgcacaatgactgacattgccaagaaacctactgagagtgcttgttcttcacttactgtcttgtttgatggtagagtggaaggacaggtagacctttttagaaacgcccgtaatggtgttttaataacagaaggttcagtcaaaggtctaacaccttcaaagggaccagcacaagctagcgtcaatggagtcacattaattggagaatcagtaaaaacacagtttaactactttaagaaagtagacggcattattcaacagttgcctgaaacctactttactcagagcagagacttagaggattttaagcccagatcacaaatggaaactgactttctcgagctcgctatggatgaattcatacagcgatataagctcgagggctatgccttcgaacacatcgtttatggagatttcagtcatggacaacttggcggtcttcatttaatgataggcttagccaagcgctcacaagattcaccacttaaattagaggattttatccctatggacagcacagtgaaaaattacttcataacagatgcgcaaacaggttcatcaaaatgtgtgtgttctgtgattgatcttttacttgatgactttgtcgagataataaagtcacaagatttgtcagtgatttcaaaagtggtcaaggttacaattgactatgctgaaatttcattcatgctttggtgtaaggatggacatgttgaaaccttctacccaaaactacaagcaagtcaagcgtggcaaccaggtgttgcgatgcctaacttgtacaagatgcaaagaatgcttcttgaaaagtgtgaccttcagaattatggtgaaaatgctgttataccaaaaggaataatgatgaatgtcgcaaagtatactcaactgtgtcaatacttaaatacacttactttagctgtaccctacaacatgagagttattcactttggtgctggctctgataaaggagttgcaccaggtacagctgtgctcagacaatggttgccaactggcacactacttgtcgattcagatcttaatgacttcgtctccgacgcagattctactttaattggagactgtgcaacagtacatacggctaataaatgggaccttattattagcgatatgtatgaccctaggaccaaacatgtgacaaaagagaatgactctaaagaagggtttttcacttatctgtgtggatttataaagcaaaaactagccctgggtggttctatagctgtaaagataacagagcattcttggaatgctgacctttacaagcttatgggccatttctcatggtggacagcttttgttacaaatgtaaatgcatcatcatcggaagcatttttaattggggctaactatcttggcaagccgaaggaacaaattgatggctataccatgcatgctaactacattttctggaggaacacaaatcctatccagttgtcttcctattcactctttgacatgagcaaatttcctcttaaattaagaggaactgctgtaatgtctcttaaggagaatcaaatcaatgatatgatttattctcttctggaaaaaggtaggcttatcattagagaaaacaacagagttgtggtttcaagtgatattcttgttaacaactaaacgaacatgtttattttcttattatttcttactctcactagtggtagtgaccttgaccggtgcaccacttttgatgatgttcaagctcctaattacactcaacatacttcatctatgaggggggtttactatcctgatgaaatttttagatcagacactctttatttaactcaggatttatttcttccattttattctaatgttacagggtttcatactattaatcatacgtttggcaaccctgtcataccttttaaggatggtatttattttgctgccacagagaaatcaaatgttgtccgtggttgggtttttggttctaccatgaacaacaagtcacagtcggtgattattattaacaattctactaatgttgttatacgagcatgtaactttgaattgtgtgacaaccctttctttgctgtttctaaacccatgggtacacagacacatactatgatattcgataatgcatttaattgcactttcgagtacatatctgatgccttttcgcttgatgtttcagaaaagtcaggtaattttaaacacttacgagagtttgtgtttaaaaataaagatgggtttctctatgtttataagggctatcaacctatagatgtagttcgtgatctaccttctggttttaacactttgaaacctatttttaagttgcctcttggtattaacattacaaattttagagccattcttacagccttttcacctgctcaagacatttggggcacgtcagctgcagcctattttgttggctatttaaagccaactacatttatgctcaagtatgatgaaaatggtacaatcacagatgctgttgattgttctcaaaatccacttgctgaactcaaatgctctgttaagagctttgagattgacaaaggaatttaccagacctctaatttcagggttgttccctcaggagatgttgtgagattccctaatattacaaacttgtgtccttttggagaggtttttaatgctactaaattcccttctgtctatgcatgggagagaaaaaaaatttctaattgtgttgctgattactctgtgctctacaactcaacatttttttcaacctttaagtgctatggcgtttctgccactaagttgaatgatctttgcttctccaatgtctatgcagattcttttgtagtcaagggagatgatgtaagacaaatagcgccaggacaaactggtgttattgctgattataattataaattgccagatgatttcatgggttgtgtccttgcttggaatactaggaacattgatgctacttcaactggtaattataattataaatataggtatcttagacatggcaagcttaggccctttgagagagacatatctaatgtgcctttctcccctgatggcaaaccttgcaccccacctgctcttaattgttattggccattaaatgattatggtttttacaccactactggcattggctaccaaccttacagagttgtagtactttcttttgaacttttaaatgcaccggccacggtttgtggaccaaaattatccactgaccttattaagaaccagtgtgtcaattttaattttaatggactcactggtactggtgtgttaactccttcttcaaagagatttcaaccatttcaacaatttggccgtgatgtttctgatttcactgattccgttcgagatcctaaaacatctgaaatattagacatttcaccttgctcttttgggggtgtaagtgtaattacacctggaacaaatgcttcatctgaagttgctgttctatatcaagatgttaactgcactgatgtttctacagcaattcatgcagatcaactcacaccagcttggcgcatatattctactggaaacaatgtattccagactcaagcaggctgtcttataggagctgagcatgtcgacacttcttatgagtgcgacattcctattggagctggcatttgtgctagttaccatacagtttctttattacgtagtactagccaaaaatctattgtggcttatactatgtctttaggtgctgatagttcaattgcttactctaataacaccattgctatacctactaacttttcaattagcattactacagaagtaatgcctgtttctatggctaaaacctccgtagattgtaatatgtacatctgcggagattctactgaatgtgctaatttgcttctccaatatggtagcttttgcacacaactaaatcgtgcactctcaggtattgctgctgaacaggatcgcaacacacgtgaagtgttcgctcaagtcaaacaaatgtacaaaaccccaactttgaaatattttggtggttttaatttttcacaaatattacctgaccctctaaagccaactaagaggtcttttattgaggacttgctctttaataaggtgacactcgctgatgctggcttcatgaagcaatatggcgaatgcctaggtgatattaatgctagagatctcatttgtgcgcagaagttcaatggacttacagtgttgccacctctgctcactgatgatatgattgctgcctacactgctgctctagttagtggtactgccactgctggatggacatttggtgctggcgctgctcttcaaataccttttgctatgcaaatggcatataggttcaatggcattggagttacccaaaatgttctctatgagaaccaaaaacaaatcgccaaccaatttaacaaggcgattagtcaaattcaagaatcacttacaacaacatcaactgcattgggcaagctgcaagacgttgttaaccagaatgctcaagcattaaacacacttgttaaacaacttagctctaattttggtgcaatttcaagtgtgctaaatgatatcctttcgcgacttgataaagtcgaggcggaggtacaaattgacaggttaattacaggcagacttcaaagccttcaaacctatgtaacacaacaactaatcagggctgctgaaatcagggcttctgctaatcttgctgctactaaaatgtctgagtgtgttcttggacaatcaaaaagagttgacttttgtggaaagggctaccaccttatgtccttcccacaagcagccccgcatggtgttgtcttcctacatgtcacgtatgtgccatcccaggagaggaacttcaccacagcgccagcaatttgtcatgaaggcaaagcatacttccctcgtgaaggtgtttttgtgtttaatggcacttcttggtttattacacagaggaacttcttttctccacaaataattactacagacaatacatttgtctcaggaaattgtgatgtcgttattggcatcattaacaacacagtttatgatcctctgcaacctgagcttgactcattcaaagaagagctggacaagtacttcaaaaatcatacatcaccagatgttgatcttggcgacatttcaggcattaacgcttctgtcgtcaacattcaaaaagaaattgaccgcctcaatgaggtcgctaaaaatttaaatgaatcactcattgaccttcaagaattgggaaaatatgagcaatatattaaatggccttggtatgtttggctcggcttcattgctggactaattgccatcgtcatggttacaatcttgctttgttgcatgactagttgttgcagttgcctcaagggtgcatgctcttgtggttcttgctgcaagtttgatgaggatgactctgagccagttctcaagggtgtcaaattacattacacataaacgaacttatggatttgtttatgagattttttactcttggatcaattactgcacagccagtaaaaattgacaatgcttctcctgcaagtactgttcatgctacagcaacgataccgctacaagcctcactccctttcggatggcttgttattggcgttgcatttcttgctgtttttcagagcgctaccaaaataattgcgctcaataaaagatggcagctagccctttataagggcttccagttcatttgcaatttactgctgctatttgttaccatctattcacatcttttgcttgtcgctgcaggtatggaggcgcaatttttgtacctctatgccttgatatattttctacaatgcatcaacgcatgtagaattattatgagatgttggctttgttggaagtgcaaatccaagaacccattactttatgatgccaactactttgtttgctggcacacacataactatgactactgtataccatataacagtgtcacagatacaattgtcgttactgaaggtgacggcatttcaacaccaaaactcaaagaagactaccaaattggtggttattctgaggataggcactcaggtgttaaagactatgtcgttgtacatggctatttcaccgaagtttactaccagcttgagtctacacaaattactacagacactggtattgaaaatgctacattcttcatctttaacaagcttgttaaagacccaccgaatgtgcaaatacacacaatcgacggctcttcaggagttgctaatccagcaatggatccaatttatgatgagccgacgacgactactagcgtgcctttgtaagcacaagaaagtgagtacgaacttatgtactcattcgtttcggaagaaacaggtacgttaatagttaatagcgtacttctttttcttgctttcgtggtattcttgctagtcacactagccatccttactgcgcttcgattgtgtgcgtactgctgcaatattgttaacgtgagtttagtaaaaccaacggtttacgtctactcgcgtgttaaaaatctgaactcttctgaaggagttcctgatcttctggtctaaacgaactaactattattattattctgtttggaactttaacattgcttatcatggcagacaacggtactattaccgttgaggagcttaaacaactcctggaacaatggaacctagtaataggtttcctatgcctagcctggattatgttactacaatttgcctattctaatcggaacaggtttttgtacataataaagcttgttttcctctggctcttgtggccagtaacacttgcttgttttgtgcttgctgctgtctacagaattaattgggtgactggcgggattgcgattgcaatggcttgtattgtaggcttgatgtggcttagctacttcgttgcttccttcaggctgtttgctcgtacccgctcaatgtggtcattcaacccagaaacaaacattcttctcaatgtgcctctccgggggacaattgtgaccagaccgctcatggaaagtgaacttgtcattggtgctgtgatcattcgtggtcacttgcgaatggccggacactccctagggcgctgtgacattaaggacctgccaaaagagatcactgtggctacatcacgaacgctttcttattacaaattaggagcgtcgcagcgtgtaggcactgattcaggttttgctgcatacaaccgctaccgtattggaaactataaattaaatacagaccacgccggtagcaacgacaatattgctttgctagtacagtaagtgacaacagatgtttcatcttgttgacttccaggttacaatagcagagatattgattatcattatgaggactttcaggattgctatttggaatcttgacgttataataagttcaatagtgagacaattatttaagcctctaactaagaagaattattcggagttagatgatgaagaacctatggagttagattatccataaaacgaacatgaaaattattctcttcctgacattgattgtatttacatcttgcgagctatatcactatcaggagtgtgttagaggtacgactgtactactaaaagaaccttgcccatcaggaacatacgagggcaattcaccatttcaccctcttgctgacaataaatttgcactaacttgcactagcacacactttgcttttgcttgtgctgacggtactcgacatacctatcagctgcgtgcaagatcagtttcaccaaaacttttcatcagacaagaggaggttcaacaagagctctactcgccactttttctcattgttgctgctctagtatttttaatactttgcttcaccattaagagaaagacagaatgaatgagctcactttaattgacttctatttgtgctttttagcctttctgctattccttgttttaataatgcttattatattttggttttcactcgaaatccaggatctagaagaaccttgtaccaaagtctaaacgaacatgaaacttctcattgttttgacttgtatttctctatgcagttgcatatgcactgtagtacagcgctgtgcatctaataaacctcatgtgcttgaagatccttgtaaggtacaacactaggggtaatacttatagcactgcttggctttgtgctctaggaaaggttttaccttttcatagatggcacactatggttcaaacatgcacacctaatgttactatcaactgtcaagatccagctggtggtgcgcttatagctaggtgttggtaccttcatgaaggtcaccaaactgctgcatttagagacgtacttgttgttttaaataaacgaacaaattaaaatgtctgataatggaccccaatcaaaccaacgtagtgccccccgcattacatttggtggacccacagattcaactgacaataaccagaatggaggacgcaatggggcaaggccaaaacagcgccgaccccaaggtttacccaataatactgcgtcttggttcacagctctcactcagcatggcaaggaggaacttagattccctcgaggccagggcgttccaatcaacaccaatagtggtccagatgaccaaattggctactaccgaagagctacccgacgagttcgtggtggtgacggcaaaatgaaagagctcagccccagatggtacttctattacctaggaactggcccagaagcttcacttccctacggcgctaacaaagaaggcatcgtatgggttgcaactgagggagccttgaatacacccaaagaccacattggcacccgcaatcctaataacaatgctgccaccgtgctacaacttcctcaaggaacaacattgccaaaaggcttctacgcagagggaagcagaggcggcagtcaagcctcttctcgctcctcatcacgtagtcgcggtaattcaagaaattcaactcctggcagcagtaggggaaattctcctgctcgaatggctagcggaggtggtgaaactgccctcgcgctattgctgctagacagattgaaccagcttgagagcaaagtttctggtaaaggccaacaacaacaaggccaaactgtcactaagaaatctgctgctgaggcatctaaaaagcctcgccaaaaacgtactgccacaaaacagtacaacgtcactcaagcatttgggagacgtggtccagaacaaacccaaggaaatttcggggaccaagacctaatcagacaaggaactgattacaaacattggccgcaaattgcacaatttgctccaagtgcctctgcattctttggaatgtcacgcattggcatggaagtcacaccttcgggaacatggctgacttatcatggagccattaaattggatgacaaagatccacaattcaaagacaacgtcatactgctgaacaagcacattgacgcatacaaaacattcccaccaacagagcctaaaaaggacaaaaagaaaaagactgatgaagctcagcctttgccgcagagacaaaagaagcagcccactgtgactcttcttcctgcggctgacatggatgatttctccagacaacttcaaaattccatgagtggagcttctgctgattcaactcaggcataaacactcatgatgaccacacaaggcagatgggctatgtaaacgttttcgcaattccgtttacgatacatagtctactcttgtgcagaatgaattctcgtaactaaacagcacaagtaggtttagttaactttaatctcacatagcaatctttaatcaatgtgtaacattagggaggacttgaaagagccaccacattttcatcgaggccacgcggagtacgatcgagggtacagtgaataatgctagggagagctgcctatatggaagagccctaatgtgtaaaattaattttagtagtgctatccccatgtgattttaatagcttcttaggagaatgacaa

SEQ ID NO: 29829 - DNA, 29729 bp, SARS Coronavirus
atattaggtttttacctacccaggaaaagccaaccaacctcgatctcttgtagatctgttctctaaacgaactttaaaatctgtgtagctgtcgctcggctgcatgcctagtgcacctacgcagtataaacaataataaattttactgtcgttgacaagaaacgagtaactcgtccctcttctgcagactgcttacggtttcgtccgtgttgcagtcgatcatcagcatacctaggtttcgtccgggtgtgaccgaaaggtaagatggagagccttgttcttggtgtcaacgagaaaacacacgtccaactcagtttgcctgtccttcaggttagagacgtgctagtgcgtggcttcggggactctgtggaagaggccctatcggaggcacgtgaacacctcaaaaatggcacttgtggtctagtagagctggaaaaaggcgtactgccccagcttgaacagccctatgtgttcattaaacgttctgatgccttaagcaccaatcacggccacaaggtcgttgagctggttgcagaaatggacggcattcagtacggtcgtagcggtataacactgggagtactcgtgccacatgtgggcgaaaccccaattgcataccgcaatgttcttcttcgtaagaacggtaataagggagccggtggtcatagctatggcatcgatctaaagtcttatgacttaggtgacgagcttggcactgatcccattgaagattatgaacaaaactggaacactaagcatggcagtggtgcactccgtgaactcactcgtgagctcaatggaggtgcagtcactcgctatgtcgacaacaatttctgtggcccagatgggtaccctcttgattgcatcaaagattttctcgcacgcgcgggcaagtcaatgtgcactctttccgaacaacttgattacatcgagtcgaagagaggtgtctactgctgccgtgaccatgagcatgaaattgcctggttcactgagcgctctgataagagctacgagcaccagacacccttcgaaattaagagtgccaagaaatttgacactttcaaaggggaatgcccaaagtttgtgtttcctcttaactcaaaagtcaaagtcattcaaccacgtgttgaaaagaaaaagactgagggtttcatggggcgtatacgctctgtgtaccctgttgcatctccacaggagtgtaacaatatgcacttgtctaccttgatgaaatgtaatcattgcgatgaagtttcatggcagacgtgcgactttctgaaagccacttgtgaacattgtggcactgaaaatttagttattgaaggacctactacatgtgggtacctacctactaatgctgtagtgaaaatgccatgtcctgcctgtcaagacccagagattggacctgagcatagtgttgcagattatcacaaccactcaaacattgaaactcgactccgcaagggaggtaggactagatgttttggaggctgtgtgtttgcctatgttggctgctataataagcgtgcctactgggttcctcgtgctagtgctgatattggctcaggccatactggcattactggtgacaatgtggagaccttgaatgaggatctccttgagatactgagtcgtgaacgtgttaacattaacattgttggcgattttcatttgaatgaagaggttgccatcattttggcatctttctctgcttctacaagtgcctttattgacactataaagagtcttgattacaagtctttcaaaaccattgttgagtcctgcggtaactataaagttaccaagggaaagcccgtaaaaggtgcttggaacattggacaacagagatcagttttaacaccactgtgtggttttccctcacaggctgctggtgttatcagatcaatttttgcgcgcacacttgatgcagcaaaccactcaattcctgatttgcaaagagcagctgtcaccatacttgatggtatttctgaacagtcattacgtcttgtcgacgccatggtttatacttcagacctgctcaccaacagtgtcattattatggcatatgtaactggtggtcttgtacaacagacttctcagtggttgtctaatcttttgggcactactgttgaaaaactcaggcctatctttgaatggattgaggcgaaacttagtgcaggagttgaatttctcaaggatgcttgggagattctcaaatttctcattacaggtgtttttgacatcgtcaagggtcaaatacaggttgcttcagataacatcaaggattgtgtaaaatgcttcattgatgttgttaacaaggcactcgaaatgtgcattgatcaagtcactatcgctggcgcaaagttgcgatcactcaacttaggtgaagtcttcatcgctcaaagcaagggactttaccgtcagtgtatacgtggcaaggagcagctgcaactactcatgcctcttaaggcaccaaaagaagtaacctttcttgaaggtgattcacatgacacagtacttacctctgaggaggttgttctcaagaacggtgaactcgaagcactcgagacgcccgttgatagcttcacaaatggagctatcgttggcacaccagtctgtgtaaatggcctcatgctcttagagattaaggacaaagaacaatactgcgcattgtctcctggtttactggctacaaacaatgtctttcgcttaaaagggggtgcaccaattaaaggtgtaacctttggagaagatactgtttgggaagttcaaggttacaagaatgtgagaatcacatttgagcttgatgaacgtgttgacaaagtgcttaatgaaaagtgctctgtctacactgttgaatccggtaccgaagttactgagtttgcatgtgttgtagcagaggctgttgtgaagactttacaaccagtttctgatctccttaccaacatgggtattgatcttgatgagtggagtgtagctacattctacttatttgatgatgctggtgaagaaaacttttcatcacgtatgtattgttccttttaccctccagatgaggaagaagaggacgatgcagagtgtgaggaagaagaaattgatgaaacctgtgaacatgagtacggtacagaggatgattatcaaggtctccctctggaatttggtgcctcagctgaaacagttcgagttgaggaagaagaagaggaagactggctggatgatactactgagcaatcagagattgagccagaaccagaacctacacctgaagaaccagttaatcagtttactggttatttaaaacttactgacaatgttgccattaaatgtgttgacatcgttaaggaggcacaaagtgctaatcctatggtgattgtaaatgctgctaacatacacctgaaacatggtggtggtgtagcaggtgcactcaacaaggcaaccaatggtgccatgcaaaaggagagtgatgattacattaagctaaatggccctcttacagtaggagggtcttgtttgctttctggacataatcttgctaagaagtgtctgcatgttgttggacctaacctaaatgcaggtgaggacatccagcttcttaaggcagcatatgaaaatttcaattcacaggacatcttacttgcaccattgttgtcagcaggcatatttggtgctaaaccacttcagtctttacaagtgtgcgtgcagacggttcgtacacaggtttatattgcagtcaatgacaaagctctttatgagcaggttgtcatggattatcttgataacctgaagcctagagtggaagcacctaaacaagaggagccaccaaacacagaagattccaaaactgaggagaaatccgtcgtacagaagcctgtcgatgtgaagccaaaaattaaggcctgcattgatgaggttaccacaacactggaagaaactaagtttcttaccaataagttactcttgtttgctgatatcaatggtaagctttaccatgattctcagaacatgcttagaggtgaagatatgtctttccttgagaaggatgcaccttacatggtaggtgatgttatcactagtggtgatatcacttgtgttgtaataccctccaaaaaggctggtggcactactgagatgctctcaagagctttgaagaaagtgccagttgatgagtatataaccacgtaccctggacaaggatgtgctggttatacacttgaggaagctaagactgctcttaagaaatgcaaatctgcattttatgtactaccttcagaagcacctaatgctaaggaagagattctaggaactgtatcctggaatttgagagaaatgcttgctcatgctgaagagacaagaaaattaatgcctatatgcatggatgttagagccataatggcaaccatccaacgtaagtataaaggaattaaaattcaagagggcatcgttgactatggtgtccgattcttcttttatactagtaaagagcctgtagcttctattattacgaagctgaactctctaaatgagccgcttgtcacaatgccaattggttatgtgacacatggttttaatcttgaagaggctgcgcgctgtatgcgttctcttaaagctcctgccgtagtgtcagtatcatcaccagatgctgttactacatataatggatacctcacttcgtcatcaaagacatctgaggagcactttgtagaaacagtttctttggctggctcttacagagattggtcctattcaggacagcgtacagagttaggtgttgaatttcttaagcgtggtgacaaaattgtgtaccacactctggagagccccgtcgagtttcatcttgacggtgaggttctttcacttgacaaactaaagagtctcttatccctgcgggaggttaagactataaaagtgttcacaactgtggacaacactaatctccacacacagcttgtggatatgtctatgacatatggacagcagtttggtccaacatacttggatggtgctgatgttacaaaaattaaacctcatgtaaatcatgagggtaagactttctttgtactacctagtgatgacacactacgtagtgaagctttcgagtactaccatactcttgatgagagttttcttggtaggtacatgtctgctttaaaccacacaaagaaatggaaatttcctcaagttggtggtttaacttcaattaaatgggctgataacaattgttatttgtctagtgttttattagcacttcaacagcttgaagtcaaattcaatgcaccagcacttcaagaggcttattatagagcccgtgctggtgatgctgctaacttttgtgcactcatactcgcttacagtaataaaactgttggcgagcttggtgatgtcagagaaactatgacccatcttctacagcatgctaatttggaatctgcaaagcgagttcttaatgtggtgtgtaaacattgtggtcagaaaactactaccttaacgggtgtagaagctgtgatgtatatgggtactctatcttatgataatcttaagacaggtgtttccattccatgtgtgtgtggtcgtgatgctacacaatatctagtacaacaagagtcttcttttgttatgatgtctgcaccacctgctgagtataaattacagcaaggtacattcttatgtgcgaatgagtacactggtaactatcagtgtggtcattacactcatataactgctaaggagaccctctatcgtattgacggagctcaccttacaaagatgtcagagtacaaaggaccagtgactgatgttttctacaaggaaacatcttacactacaaccatcaagcctgtgtcgtataaactcgatggagttacttacacagagattgaaccaaaattggatgggtattataaaaaggataatgcttactatacagagcagcctatagaccttgtaccaactcaaccattaccaaatgcgagttttgataatttcaaactcacatgttctaacacaaaatttgctgatgatttaaatcaaatgacaggcttcacaaagccagcttcacgagagctatctgtcacattcttcccagacttgaatggcgatgtagtggctattgactatagacactattcagcgagtttcaagaaaggtgctaaattactgcataagccaattgtttggcacattaaccaggctacaaccaagacaacgttcaaaccaaacacttggtgtttacgttgtctttggagtacaaagccagtagatacttcaaattcatttgaagttctggcagtagaagacacacaaggaatggacaatcttgcttgtgaaagtcaacaacccacctctgaagaagtagtggaaaatcctaccatacagaaggaagtcatagagtgtgacgtgaaaactaccgaagttgtaggcaatgtcatacttaaaccatcagatgaaggtgttaaagtaacacaagagttaggtcatgaggatcttatggctgcttatgtggaaaacacaagcattaccattaagaaacctaatgagctttcactagccttaggtttaaaaacaattgccactcatggtattgctgcaattaatagtgttccttggagtaaaattttggcttatgtcaaaccattcttaggacaagcagcaattacaacatcaaattgcgctaagagattagcacaacgtgtgtttaacaattatatgccttatgtgtttacattattgttccaattgtgtacttttactaaaagtaccaattctagaattagagcttcactacctacaactattgctaaaaatagtgttaagagtgttgctaaattatgtttggatgccggcattaattatgtgaagtcacccaaattttctaaattgttcacaatcgctatgtggctattgttgttaagtatttgcttaggttctctaatctgtgtaactgctgcttttggtgtactcttatctaattttggtgctccttcttattgtaatggcgttagagaattgtatcttaattcgtctaacgttactactatggatttctgtgaaggttcttttccttgcagcatttgtttaagtggattagactcccttgattcttatccagctcttgaaaccattcaggtgacgatttcatcgtacaagctagacttgacaattttaggtctggccgctgagtgggttttggcatatatgttgttcacaaaattcttttatttattaggtctttcagctataatgcaggtgttctttggctattttgctagtcatttcatcagcaattcttggctcatgtggtttatcattagtattgtacaaatggcacccgtttctgcaatggttaggatgtacatcttctttgcttctttctactacatatggaagagctatgttcatatcatggatggttgcacctcttcgacttgcatgatgtgctataagcgcaatcgtgccacacgcgttgagtgtacaactattgttaatggcatgaagagatctttctatgtctatgcaaatggaggccgtggcttctgcaagactcacaattggaattgtctcaattgtgacacattttgcactggtagtacattcattagtgatgaagttgctcgtgatttgtcactccagtttaaaagaccaatcaaccctactgaccagtcatcgtatattgttgatagtgttgctgtgaaaaatggcgcgcttcacctctactttgacaaggctggtcaaaagacctatgagagacatccgctctcccattttgtcaatttagacaatttgagagctaacaacactaaaggttcactgcctattaatgtcatagtttttgatggcaagtccaaatgcgacgagtctgcttctaagtctgcttctgtgtactacagtcagctgatgtgccaacctattctgttgcttgaccaagctcttgtatcagacgttggagatagtactgaagtttccgttaagatgtttgatgcttatgtcgacaccttttcagcaacttttagtgttcctatggaaaaacttaaggcacttgttgctacagctcacagcgagttagcaaagggtgtagctttagatggtgtcctttctacattcgtgtcagctgcccgacaaggtgttgttgataccgatgttgacacaaaggatgttattgaatgtctcaaactttcacatcactctgacttagaagtgacaggtgacagttgtaacaatttcatgctcacctataataaggttgaaaacatgacgcccagagatcttggcgcatgtattgactgtaatgcaaggcatatcaatgcccaagtagcaaaaagtcacaatgtttcactcatctggaatgtaaaagactacatgtctttatctgaacagctgcgtaaacaaattcgtagtgctgccaagaagaacaacataccttttagactaacttgtgctacaactagacaggttgtcaatgtcataactactaaaatctcactcaagggtggtaagattgttagtacttgttttaaacttatgcttaaggccacattattgtgcgttcttgctgcattggtttgttatatcgttatgccagtacatacattgtcaatccatgatggttacacaaatgaaatcattggttacaaagccattcaggatggtgtcactcgtgacatcatttctactgatgattgttttgcaaataaacatgctggttttgacgcatggtttagccagcgtggtggttcatacaaaaatgacaaaagctgccctgtagtagctgctatcattacaagagagattggtttcatagtgcctggcttaccgggtactgtgctgagagcaatcaatggtgacttcttgcattttctacctcgtgtttttagtgctgttggcaacatttgctacacaccttccaaactcattgagtatagtgattttgctacctctgcttgcgttcttgctgctgagtgtacaatttttaaggatgctatgggcaaacctgtgccatattgttatgacactaatttgctagagggttctatttcttatagtgagcttcgtccagacactcgttatgtgcttatggatggttccatcatacagtttcctaacacttacctggagggttctgttagagtagtaacaacttttgatgctgagtactgtagacatggtacatgcgaaaggtcagaagtaggtatttgcctatctaccagtggtagatgggttcttaataatgagcattacagagctctatcaggagttttctgtggtgttgatgcgatgaatctcatagctaacatctttactcctcttgtgcaacctgtgggtgctttagatgtgtctgcttcagtagtggctggtggtattattgccatattggtgacttgtgctgcctactactttatgaaattcagacgtgtttttggtgagtacaaccatgttgttgctgctaatgcacttttgtttttgatgtctttcactatactctgtctggtaccagcttacagctttctgccgggagtctactcagtcttttacttgtacttgacattctatttcaccaatgatgtttcattcttggctcaccttcaatggtttgccatgttttctcctattgtgcctttttggataacagcaatctatgtattctgtatttctctgaagcactgccattggttctttaacaactatcttaggaaaagagtcatgtttaatggagttacatttagtaccttcgaggaggctgctttgtgtacctttttgctcaacaaggaaatgtacctaaaattgcgtagcgagacactgttgccacttacacagtataacaggtatcttgctctatataacaagtacaagtatttcagtggagccttagatactaccagctatcgtgaagcagcttgctgccacttagcaaaggctctaaatgactttagcaactcaggtgctgatgttctctaccaaccaccacagacatcaatcacttctgctgttctgcagagtggttttaggaaaatggcattcccgtcaggcaaagttgaagggtgcatggtacaagtaacctgtggaactacaactcttaatggattgtggttggatgacacagtatactgtccaagacatgtcatttgcacagcagaagacatgcttaatcctaactatgaagatctgctcattcgcaaatccaaccatagctttcttgttcaggctggcaatgttcaacttcgtgttattggccattctatgcaaaattgtctgcttaggcttaaagttgatacttctaaccctaagacacccaagtataaatttgtccgtatccaacctggtcaaacattttcagttctagcatgctacaatggttcaccatctggtgtttatcagtgtgccatgagacctaatcataccattaaaggttctttccttaatggatcatgtggtagtgttggttttaacattgattatgattgcgtgtctttctgctatatgcatcatatggagcttccaacaggagtacacgctggtactgacttagaaggtaaattctatggtccatttgttgacagacaaactgcacaggctgcaggtacagacacaaccataacattaaatgttttggcatggctgtatgctgctgttatcaatggtgataggtggtttcttaatagattcaccactactttgaatgactttaaccttgtggcaatgaagtacaactatgaacctttgacacaagatcatgttgacatattgggacctctttctgctcaaacaggaattgccgtcttagatatgtgtgctgctttgaaagagctgctgcagaatggtatgaatggtcgtactatccttggtagcactattttagaagatgagtttacaccatttgatgttgttagacaatgctctggtgttaccttccaaggtaagttcaagaaaattgttaagggcactcatcattggatgcttttaactttcttgacatcactattgattcttgttcaaagtacacagtggtcactgtttttctttgtttacgagaatgctttcttgccatttactcttggtattatggcaattgctgcatgtgctatgctgcttgttaagcataagcacgcattcttgtgcttgtttctgttaccttctcttgcaacagttgcttactttaatatggtctacatgcctgctagctgggtgatgcgtatcatgacatggcttgaattggctgacactagcttgtctggttataggcttaaggattgtgttatgtatgcttcagctttagttttgcttattctcatgacagctcgcactgtttatgatgatgctgctagacgtgtttggacactgatgaatgtcattacacttgtttacaaagtctactatggtaatgctttagatcaagctatttccatgtgggccttagttatttctgtaacctctaactattctggtgtcgttacgactatcatgtttttagctagagctatagtgtttgtgtgtgttgagtattatccattgttatttattactggcaacaccttacagtgtatcatgcttgtttattgtttcttaggctattgttgctgctgctactttggccttttctgtttactcaaccgttacttcaggcttactcttggtgtttatgactacttggtctctacacaagaatttaggtatatgaactcccaggggcttttgcctcctaagagtagtattgatgctttcaagcttaacattaagttgttgggtattggaggtaaaccatgtatcaaggttgctactgtacagtctaaaatgtctgacgtaaagtgcacatctgtggtactgctctcggttcttcaacaacttagagtagagtcatcttctaaattgtgggcacaatgtgtacaactccacaatgatattcttcttgcaaaagacacaactgaagctttcgagaagatggtttctcttttgtctgttttgctatccatgcagggtgctgtagacattaataggttgtgcgaggaaatgctcgataaccgtgctactcttcaggctattgcttcagaatttagttctttaccatcatatgccgcttatgccactgcccaggaggcctatgagcaggctgtagctaatggtgattctgaagtcgttctcaaaaagttaaagaaatctttgaatgtggctaaatctgagtttgaccgtgatgctgccatgcaacgcaagttggaaaagatggcagatcaggctatgacccaaatgtacaaacaggcaagatctgaggacaagagggcaaaagtaactagtgctatgcaaacaatgctcttcactatgcttaggaagcttgataatgatgcacttaacaacattatcaacaatgcgcgtgatggttgtgttccactcaacatcataccattgactacagcagccaaactcatggttgttgtccctgattatggtacctacaagaacacttgtgatggtaacacctttacatatgcatctgcactctgggaaatccagcaagttgttgatgcggatagcaagattgttcaacttagtgaaattaacatggacaattcaccaaatttggcttggcctcttattgttacagctctaagagccaactcagctgttaaactacagaataatgaactgagtccagtagcactacgacagatgtcctgtgcggctggtaccacacaaacagcttgtactgatgacaatgcacttgcctactataacaattcgaagggaggtaggtttgtgctggcattactatcagaccaccaagatctcaaatgggctagattccctaagagtgatggtacaggtacaatttacacagaactggaaccaccttgtaggtttgttacagacacaccaaaagggcctaaagtgaaatacttgtacttcatcaaaggcttaaacaacctaaatagaggtatggtgctgggcagtttagctgctacagtacgtcttcaggctggaaatgctacagaagtacctgccaattcaactgtgctttccttctgtgcttttgcagtagaccctgctaaagcatataaggattacctagcaagtggaggacaaccaatcaccaactgtgtgaagatgttgtgtacacacactggtacaggacaggcaattactgtaacaccagaagctaacatggaccaagagtcctttggtggtgcttcatgttgtctgtattgtagatgccacattgaccatccaaatcctaaaggattctgtgacttgaaaggtaagtacgtccaaatacctaccacttgtgctaatgacccagtgggttttacacttagaaacacagtctgtaccgtctgcggaatgtggaaaggttatggctgtagttgtgaccaactccgcgaacccttgatgcagtctgcggatgcatcaacgtttttaaacgggtttgcggtgtaagtgcagcccgtcttacaccgtgcggcacaggcactagtactgatgtcgtctacagggcttttgatatttacaacgaaaaagttgctggttttgcaaagttcctaaaaactaattgctgtcgcttccaggagaaggatgaggaaggcaatttattagactcttactttgtagttaagaggcatactatgtctaactaccaacatgaagagactatttataacttggttaaagattgtccagcggttgctgtccatgactttttcaagtttagagtagatggtgacatggtaccacatatatcacgtcagcgtctaactaaatacacaatggctgatttagtctatgctctacgtcattttgatgagggtaattgtgatacattaaaagaaatactcgtcacatacaattgctgtgatgatgattatttcaataagaaggattggtatgacttcgtagagaatcctgacatcttacgcgtatatgctaacttaggtgagcgtgtacgccaatcattattaaagactgtacaattctgcgatgctatgcgtgatgcaggcattgtaggcgtactgacattagataatcaggatcttaatgggaactggtacgatttcggtgatttcgtacaagtagcaccaggctgcggagttcctattgtggattcatattactcattgctgatgcccatcctcactttgactagggcattggctgctgagtcccatatggatgctgatctcgcaaaaccacttattaagtgggatttgctgaaatatgattttacggaagagagactttgtctcttcgaccgttattttaaatattgggaccagacataccatcccaattgtattaactgtttggatgataggtgtatccttcattgtgcaaactttaatgtgttattttctactgtgtttccacctacaagttttggaccactagtaagaaaaatatttgtagatggtgttccttttgttgtttcaactggataccattttcgtgagttaggagtcgtacataatcaggatgtaaacttacatagctcgcgtctcagtttcaaggaacttttagtgtatgctgctgatccagctatgcatgcagcttctggcaatttattgctagataaacgcactacatgcttttcagtagctgcactaacaaacaatgttgcttttcaaactgtcaaacccggtaattttaataaagacttttatgactttgctgtgtctaaaggtttctttaaggaaggaagttctgttgaactaaaacacttcttctttgctcaggatggcaacgctgctatcagtgattatgactattatcgttataatctgccaacaatgtgtgatatcagacaactcctattcgtagttgaagttgttgataaatactttgattgttacgatggtggctgtattaatgccaaccaagtaatcgttaacaatctggataaatcagctggtttcccatttaataaatggggtaaggctagactttattatgactcaatgagttatgaggatcaagatgcacttttcgcgtatactaagcgtaatgtcatcmctactataactcaaatgaatcttaagtatgccattagtgcaaagaatagagctcgcaccgtagctggtgtctctatctgtagtactatgacaaatagacagtttcatcagaaattattgaagtcaatagccgccactagaggagctactgtggtaattggaacaagcaagttttacggtggctggcataatatgttaaaaactgtttacagtgatgtagaaactccacaccttatgggttgggattatccaaaatgtgacagagccatgcctaacatgcttaggataatggcctctcttgttcttgctcgcaaacataacacttgctgtaacttatcacaccgtttctacaggttagctaacgagtgtgcgcaagtattaagtgagatggtcatgtgtggcggctcactatatgttaaaccaggtggaacatcatccggtgatgctacaactgcttatgctaatagtgtctttaacatttgtcaagctgttacagccaatgtaaatgcacttctttcaactgatggtaataagatagctgacaagtatgtccgcaatctacaacacaggctctatgagtgtctctatagaaatagggatgttgatcatgaattcgtggatgagttttacgcttacctgcgtaaacatttctccatgatgattctttctgatgatgccgttgtgtgctataacagtaactatgcggctcaaggtttagtagctagcattaagaactttaaggcagttctttattatcaaaataatgtgttcatgtctgaggcaaaatgttggactgagactgaccttactaaaggacctcacgaattttgctcacagcatacaatgctagttaaacaaggagatgattacgtgtacctgccttacccagatccatcaagaatattaggcgcaggctgttttgtcgatgatattgtcaaaacagatggtacacttatgattgaaaggttcgtgtcactggctattgatgcttacccacttacaaaacatcctaatcaggagtatgctgatgtctttcacttgtatttacaatacattagaaagttacatgatgagcttactggccacatgttggacatgtattccgtaatgctaactaatgataacacctcacggtactgggaacctgagttttatgaggctatgtacacaccacatacagtcttgcaggctgtaggtgcttgtgtattgtgcaattcacagacttcacttcgttgcggtgcctgtattaggagaccattcctatgttgcaagtgctgctatgaccatgtcatttcaacatcacacaaattagtgttgtctgttaatccctatgtttgcaatgccccaggttgtgatgtcactgatgtgacacaactgtatctaggaggtatgagctattattgcaagtcacataagcctcccattagttttccattatgtgctaatggtcaggtttttggtttatacaaaaacacatgtgtaggcagtgacaatgtcactgacttcaatgcgatagcaacatgtgattggactaatgctggcgattacatacttgccaacacttgtactgagagactcaagcttttcgcagcagaaacgctcaaagccactgaggaaacatttaagctgtcatatggtattgccactgtacgcgaagtactctctgacagagaattgcatctttcatgggaggttggaaaacctagaccaccattgaacagaaactatgtctttactggttaccgtgtaactaaaaatagtaaagtacagattggagagtacacctttgaaaaaggtgactatggtgatgctgttgtgtacagaggtactacgacatacaagttgaatgttggtgattactttgtgttgacatctcacactgtaatgccacttagtgcacctactctagtgccacaagagcactatgtgagaattactggcttgtacccaacactcaacatctcagatgagttttctagcaatgttgcaaattatcaaaaggtcggcatgcaaaagtactctacactccaaggaccacctggtactggtaagagtcattttgccatcggacttgctctctattacccatctgctcgcatagtgtatacggcatgctctcatgcagctgttgatgccctatgtgaaaaggcattaaaatatttgcccatagataaatgtagtagaatcatacctgcgcgtgcgcgcgtagagtgttttgataaattcaaagtgaattcaacactagaacagtatgttttctgcactgtaaatgcattgccagaaacaactgctgacattgtagtctttgatgaaatctctatggctactaattatgacttgagtgttgtcaatgctagacttcgtgcaaaacactacgtctatattggcgatcctgctcaattaccagccccccgcacattgctgactaaaggcacactagaaccagaatattttaattcagtgtgcagacttatgaaaacaataggtccagacatgttccttggaacttgtcgccgttgtcctgctgaaattgttgacactgtgagtgctttagtttatgacaataagctaaaagcacacaaggataagtcagctcaatgcttcaaaatgttctacaaaggtgttattacacatgatgtttcatctgcaatcaacagacctcaaataggcgttgtaagagaatttcttacacgcaatcctgcttggagaaaagctgtttttatctcaccttataattcacagaacgctgtagcttcaaaaatcttaggattgcctacgcagactgttgattcatcacagggttctgaatatgactatgtcatattcacacaaactactgaaacagcacactcttgtaatgtcaaccgcttcaatgtggctatcacaagggcaaaaattggcattttgtgcataatgtctgatagagatctttatgacaaactgcaatttacaagtctagaaataccacgtcgcaatgtggctacattacaagcagaaaatgtaactggactttttaaggactgtagtaagatcattactggtcttcatcctacacaggcacctacacacctcagcgttgatataaagttcaagactgaaggattatgtgttgacataccaggcataccaaaggacatgacctaccgtagactcatctctatgatgggtttcaaaatgaattaccaagtcaatggttaccctaatatgtttatcacccgcgaagaagctattcgtcacgttcgtgcgtggattggctttgatgtagagggctgtcatgcaactagagatgctgtgggtactaacctacctctccagctaggattttctacaggtgttaacttagtagctgtaccgactggttatgttgacactgaaaataacacagaattcaccagagttaatgcaaaacctccaccaggtgaccagtttaaacatcttataccactcatgtataaaggcttgccctggaatgtagtgcgtattaagatagtacaaatgctcagtgatacactgaaaggattgtcagacagagtcgtgttcgtcctttgggcgcatggctttgagcttacatcaatgaagtactttgtcaagattggacctgaaagaacgtgttgtctgtgtgacaaacgtgcaacttgcttttctacttcatcagatacttatgcctgctggaatcattctgtgggttttgactatgtctataacccatttatgattgatgttcagcagtggggctttacgggtaaccttcagagtaaccatgaccaacattgccaggtacatggaaatgcacatgtggctagttgtgatgctatcatgactagatgtttagcagtccatgagtgctttgttaagcgcgttgattggtctgttgaataccctattataggagatgaactgagggttaattctgcttgcagaaaagtacaacacatggttgtgaagtctgcattgcttgctgataagtttccagttcttcatgacattggaaatccaaaggctatcaagtgtgtgcctcaggctgaagtagaatggaagttctacgatgctcagccatgtagtgacaaagcttacaaaatagaggaactcttctattcttatgctacacatcacgataaattcactgatggtgtttgtttgttttggaattgtaacgttgatcgttacccagccaatgcaattgtgtgtaggtttgacacaagagtcttgtcaaacttgaacttaccaggctgtgatggtggtagtttgtatgtgaataagcatgcattccacactccagctttcgataaaagtgcatttactaatttaaagcaattgcctttcttttactattctgatagtccttgtgagtctcatggcaaacaagtagtgtcggatattgattatgttccactcaaatctgctacgtgtattacacgatgcaatttaggtggtgctgtttgcagacaccatgcaaatgagtaccgacagtacttggatgcatataatatgatgatttctgctggatttagcctatggatttacaaacaatttgatacttataacctgtggaatacatttaccaggttacagagtttagaaaatgtggcttataatgttgttaataaaggacactttgatggacacgccggcgaagcacctgtttccatcattaataatgctgtttacacaaaggtagatggtattgatgtggagatctttgaaaataagacaacacttcctgttaatgttgcatttgagctttgggctaagcgtaacattaaaccagtgccagagattaagatactcaataatttgggtgttgatatcgctgctaatactgtaatctgggactacaaaagagaagccccagcacatgtatctacaataggtgtctgcacaatgactgacattgccaagaaacctactgagagtgcttgttcttcacttactgtcttgtttgatggtagagtggaaggacaggtagacctttttagaaacgcccgtaatggtgttttaataacagaaggttcagtcaaaggtctaacaccttcaaagggaccagcacaagctagcgtcaatggagtcacattaattggagaatcagtaaaaacacagtttaactactttaagaaagtagacggcattattcaacagttgcctgaaacctactttactcagagcagagacttagaggattttaagcccagatcacaaatggaaactgactttctcgagctcgctatggatgaattcatacagcgatataagctcgagggctatgccttcgaacacatcgtttatggagatttcagtcatggacaacttggcggtcttcatttaatgataggcttagccaagcgctcacaagattcaccacttaaattagaggattttatccctatggacagcacagtgaaaaattacttcataacagatgcgcaaacaggttcatcaaaatgtgtgtgttctgtgattgatcttttacttgatgactttgtcgagataataaagtcacaagatttgtcagtgatttcaaaagtggtcaaggttacaattgactatgctgaaatttcattcatgctttggtgtaaggatggacatgttgaaaccttctacccaaaactacaagcaagtcaagcgtggcaaccaggtgttgcgatgcctaacttgtacaagatgcaaagaatgcttcttgaaaagtgtgaccttcagaattatggtgaaaatgctgttataccaaaaggaataatgatgaatgtcgcaaagtatactcaactgtgtcaatacttaaatacacttactttagctgtaccctacaacatgagagttattcactttggtgctggctctgataaaggagttgcaccaggtacagctgtgctcagacaatggttgccaactggcacactacttgtcgattcagatcttaatgacttcgtctccgacgcagattctactttaattggagactgtgcaacagtacatacggctaataaatgggaccttattattagcgatatgtatgaccctaggaccaaacatgtgacaaaagagaatgactctaaagaagggtttttcacttatctgtgtggatttataaagcaaaaactagccctgggtggttctatagctgtaaagataacagagcattcttggaatgctgacctttacaagcttatgggccatttctcatggtggacagcttttgttacaaatgtaaatgcatcatcatcggaagcatttttaattggggctaactatcttggcaagccgaaggaacaaattgatggctataccatgcatgctaactacattttctggaggaacacaaatcctatccagttgtcttcctattcactctttgacatgagcaaatttcctcttaaattaagaggaactgctgtaatgtctcttaaggagaatcaaatcaatgatatgatttattctcttctggaaaaaggtaggcttatcattagagaaaacaacagagttgtggtttcaagtgatattcttgttaacaactaaacgaacatgtttattttcttattatttcttactctcactagtggtagtgaccttgaccggtgcaccacttttgatgatgttcaagctcctaattacactcaacatacttcatctatgaggggggtttactatcctgatgaaatttttagatcagacactctttatttaactcaggatttatttcttccattttattctaatgttacagggtttcatactattaatcatacgtttggcaaccctgtcataccttttaaggatggtatttattttgctgccacagagaaatcaaatgttgtccgtggttgggtttttggttctaccatgaacaacaagtcacagtcggtgattattattaacaattctactaatgttgttatacgagcatgtaactttgaattgtgtgacaaccctttctttgctgtttctaaacccatgggtacacagacacatactatgatattcgataatgcatttaattgcactttcgagtacatatctgatgccttttcgcttgatgtttcagaaaagtcaggtaattttaaacacttacgagagtttgtgtttaaaaataaagatgggtttctctatgtttataagggctatcaacctatagatgtagttcgtgatctaccttctggttttaacactttgaaacctatttttaagttgcctcttggtattaacattacaaattttagagccattcttacagccttttcacctgctcaagacatttggggcacgtcagctgcagcctattttgttggctatttaaagccaactacatttatgctcaagtatgatgaaaatggtacaatcacagatgctgttgattgttctcaaaatccacttgctgaactcaaatgctctgttaagagctttgagattgacaaaggaatttaccagacctctaatttcagggttgttccctcaggagatgttgtgagattccctaatattacaaacttgtgtccttttggagaggtttttaatgctactaaattcccttctgtctatgcatgggagagaaaaaaaatttctaattgtgttgctgattactctgtgctctacaactcaacatttttttcaacctttaagtgctatggcgtttctgccactaagttgaatgatctttgcttctccaatgtctatgcagattcttttgtagtcaagggagatgatgtaagacaaatagcgccaggacaaactggtgttattgctgattataattataaattgccagatgatttcatgggttgtgtccttgcttggaatactaggaacattgatgctacttcaactggtaattataattataaatataggtatcttagacatggcaagcttaggccctttgagagagacatatctaatgtgcctttctcccctgatggcaaaccttgcaccccacctgctcttaattgttattggccattaaatgattatggtttttacaccactactggcattggctaccaaccttacagagttgtagtactttcttttgaacttttaaatgcaccggccacggtttgtggaccaaaattatccactgaccttattaagaaccagtgtgtcaattttaattttaatggactcactggtactggtgtgttaactccttcttcaaagagatttcaaccatttcaacaatttggccgtgatgtttctgatttcactgattccgttcgagatcctaaaacatctgaaatattagacatttcaccttgctcttttgggggtgtaagtgtaattacacctggaacaaatgcttcatctgaagttgctgttctatatcaagatgttaactgcactgatgtttctacagcaattcatgcagatcaactcacaccagcttggcgcatatattctactggaaacaatgtattccagactcaagcaggctgtcttataggagctgagcatgtcgacacttcttatgagtgcgacattcctattggagctggcatttgtgctagttaccatacagtttctttattacgtagtactagccaaaaatctattgtggcttatactatgtctttaggtgctgatagttcaattgcttactctaataacaccattgctatacctactaacttttcaattagcattactacagaagtaatgcctgtttctatggctaaaacctccgtagattgtaatatgtacatctgcggagattctactgaatgtgctaatttgcttctccaatatggtagcttttgcacacaactaaatcgtgcactctcaggtattgctgctgaacaggatcgcaacacacgtgaagtgttcgctcaagtcaaacaaatgtacaaaaccccaactttgaaatattttggtggttttaatttttcacaaatattacctgaccctctaaagccaactaagaggtcttttattgaggacttgctctttaataaggtgacactcgctgatgctggcttcatgaagcaatatggcgaatgcctaggtgatattaatgctagagatctcatttgtgcgcagaagttcaatggacttacagtgttgccacctctgctcactgatgatatgattgctgcctacactgctgctctagttagtggtactgccactgctggatggacatttggtgctggcgctgctcttcaaataccttttgctatgcaaatggcatataggttcaatggcattggagttacccaaaatgttctctatgagaaccaaaaacaaatcgccaaccaatttaacaaggcgattagtcaaattcaagaatcacttacaacaacatcaactgcattgggcaagctgcaagacgttgttaaccagaatgctcaagcattaaacacacttgttaaacaacttagctctaattttggtgcaatttcaagtgtgctaaatgatatcctttcgcgacttgataaagtcgaggcggaggtacaaattgacaggttaattacaggcagacttcaaagccttcaaacctatgtaacacaacaactaatcagggctgctgaaatcagggcttctgctaatcttgctgctactaaaatgtctgagtgtgttcttggacaatcaaaaagagttgacttttgtggaaagggctaccaccttatgtccttcccacaagcagccccgcatggtgttgtcttcctacatgtcacgtatgtgccatcccaggagaggaacttcaccacagcgccagcaatttgtcatgaaggcaaagcatacttccctcgtgaaggtgtttttgtgtttaatggcacttcttggtttattacacagaggaacttcttttctccacaaataattactacagacaatacatttgtctcaggaaattgtgatgtcgttattggcatcattaacaacacagtttatgatcctctgcaacctgagcttgactcattcaaagaagagctggacaagtacttcaaaaatcatacatcaccagatgttgatcttggcgacatttcaggcattaacgcttctgtcgtcaacattcaaaaagaaattgaccgcctcaatgaggtcgctaaaaatttaaatgaatcactcattgaccttcaagaattgggaaaatatgagcaatatattaaatggccttggtatgtttggctcggcttcattgctggactaattgccatcgtcatggttacaatcttgctttgttgcatgactagttgttgcagttgcctcaagggtgcatgctcttgtggttcttgctgcaagtttgatgaggatgactctgagccagttctcaagggtgtcaaattacattacacataaacgaacttatggatttgtttatgagattttttactcttggatcaattactgcacagccagtaaaaattgacaatgcttctcctgcaagtactgttcatgctacagcaacgataccgctacaagcctcactccctttcggatggcttgttattggcgttgcatttcttgctgtttttcagagcgctaccaaaataattgcgctcaataaaagatggcagctagccctttataagggcttccagttcatttgcaatttactgctgctatttgttaccatctattcacatcttttgcttgtcgctgcaggtatggaggcgcaatttttgtacctctatgccttgatatattttctacaatgcatcaacgcatgtagaattattatgagatgttggctttgttggaagtgcaaatccaagaacccattactttatgatgccaactactttgtttgctggcacacacataactatgactactgtataccatataacagtgtcacagatacaattgtcgttactgaaggtgacggcatttcaacaccaaaactcaaagaagactaccaaattggtggttattctgaggataggcactcaggtgttaaagactatgtcgttgtacatggctatttcaccgaagtttactaccagcttgagtctacacaaattactacagacactggtattgaaaatgctacattcttcatctttaacaagcttgttaaagacccaccgaatgtgcaaatacacacaatcgacggctcttcaggagttgctaatccagcaatggatccaatttatgatgagccgacgacgactactagcgtgcctttgtaagcacaagaaagtgagtacgaacttatgtactcattcgtttcggaagaaacaggtacgttaatagttaatagcgtacttctttttcttgctttcgtggtattcttgctagtcacactagccatccttactgcgcttcgattgtgtgcgtactgctgcaatattgttaacgtgagtttagtaaaaccaacggtttacgtctactcgcgtgttaaaaatctgaactcttctgaaggagttcctgatcttctggtctaaacgaactaactattattattattctgtttggaactttaacattgcttatcatggcagacaacggtactattaccgttgaggagcttaaacaactcctggaacaatggaacctagtaataggtttcctatgcctagcctggattatgttactacaatttgcctattctaatcggaacaggtttttgtacataataaagcttgttttcctctggctcttgtggccagtaacacttgcttgttttgtgcttgctgctgtctacagaattaattgggtgactggcgggattgcgattgcaatggcttgtattgtaggcttgatgtggcttagctacttcgttgcttccttcaggctgtttgctcgtacccgctcaatgtggtcattcaacccagaaacaaacattcttctcaatgtgcctctccgggggacaattgtgaccagaccgctcatggaaagtgaacttgtcattggtgctgtgatcattcgtggtcacttgcgaatggccggacactccctagggcgctgtgacattaaggacctgccaaaagagatcactgtggctacatcacgaacgctttcttattacaaattaggagcgtcgcagcgtgtaggcactgattcaggttttgctgcatacaaccgctaccgtattggaaactataaattaaatacagaccacgccggtagcaacgacaatattgctttgctagtacagtaagtgacaacagatgtttcatcttgttgacttccaggttacaatagcagagatattgattatcattatgaggactttcaggattgctatttggaatcttgacgttataataagttcaatagtgagacaattatttaagcctctaactaagaagaattattcggagttagatgatgaagaacctatggagttagattatccataaaacgaacatgaaaattattctcttcctgacattgattgtatttacatcttgcgagctatatcactatcaggagtgtgttagaggtacgactgtactactaaaagaaccttgcccatcaggaacatacgagggcaattcaccatttcaccctcttgctgacaataaatttgcactaacttgcactagcacacactttgcttttgcttgtgctgacggtactcgacatacctatcagctgcgtgcaagatcagtttcaccaaaacttttcatcagacaagaggaggttcaacaagagctctactcgccactttttctcattgttgctgctctagtatttttaatactttgcttcaccattaagagaaagacagaatgaatgagctcactttaattgacttctatttgtgctttttagcctttctgctattccttgttttaataatgcttattatattttggttttcactcgaaatccaggatctagaagaaccttgtaccaaagtctaaacgaacatgaaacttctcattgttttgacttgtatttctctatgcagttgcatatgcactgtagtacagcgctgtgcatctaataaacctcatgtgcttgaagatccttgtaaggtacaacactaggggtaatacttatagcactgcttggctttgtgctctaggaaaggttttaccttttcatagatggcacactatggttcaaacatgcacacctaatgttactatcaactgtcaagatccagctggtggtgcgcttatagctaggtgttggtaccttcatgaaggtcaccaaactgctgcatttagagacgtacttgttgttttaaataaacgaacaaattaaaatgtctgataatggaccccaatcaaaccaacgtagtgccccccgcattacatttggtggacccacagattcaactgacaataaccagaatggaggacgcaatggggcaaggccaaaacagcgccgaccccaaggtttacccaataatactgcgtcttggttcacagctctcactcagcatggcaaggaggaacttagattccctcgaggccagggcgttccaatcaacaccaatagtggtccagatgaccaaattggctactaccgaagagctacccgacgagttcgtggtggtgacggcaaaatgaaagagctcagccccagatggtacttctattacctaggaactggcccagaagcttcacttccctacggcgctaacaaagaaggcatcgtatgggttgcaactgagggagccttgaatacacccaaagaccacattggcacccgcaatcctaataacaatgctgccaccgtgctacaacttcctcaaggaacaacattgccaaaaggcttctacgcagagggaagcagaggcggcagtcaagcctcttctcgctcctcatcacgtagtcgcggtaattcaagaaattcaactcctggcagcagtaggggaaattctcctgctcgaatggctagcggaggtggtgaaactgccctcgcgctattgctgctagacagattgaaccagcttgagagcaaagtttctggtaaaggccaacaacaacaaggccaaactgtcactaagaaatctgctgctgaggcatctaaaaagcctcgccaaaaacgtactgccacaaaacagtacaacgtcactcaagcatttgggagacgtggtccagaacaaacccaaggaaatttcggggaccaagacctaatcagacaaggaactgattacaaacattggccgcaaattgcacaatttgctccaagtgcctctgcattctttggaatgtcacgcattggcatggaagtcacaccttcgggaacatggctgacttatcatggagccattaaattggatgacaaagatccacaattcaaagacaacgtcatactgctgaacaagcacattgacgcatacaaaacattcccaccaacagagcctaaaaaggacaaaaagaaaaagactgatgaagctcagcctttgccgcagagacaaaagaagcagcccactgtgactcttcttcctgcggctgacatggatgatttctccagacaacttcaaaattccatgagtggagcttctgctgattcaactcaggcataaacactcatgatgaccacacaaggcagatgggctatgtaaacgttttcgcaattccgtttacgatacatagtctactcttgtgcagaatgaattctcgtaactaaacagcacaagtaggtttagttaactttaatctcacatagcaatctttaatcaatgtgtaacattagggaggacttgaaagagccaccacattttcatcgaggccacgcggagtacgatcgagggtacagtgaataatgctagggagagctgcctatatggaagagccctaatgtgtaaaattaattttagtagtgctatccccatgtgattttaatagcttcttaggagaatgacaa

SEQ ID NO: 29830 - DNA, 29729 bp, SARS Coronavirus
atattaggtttttacctacccaggaaaagccaaccaacctcgatctcttgtagatctgttctctaaacgaactttaaaatctgtgtagctgtcgctcggctgcatgcctagtgcacctacgcagtataaacaataataaattttactgtcgttgacaagaaacgagtaactcgtccctcttctgcagactgcttacggtttcgtccgtgttgcagtcgatcatcagcatacctaggtttcgtccgggtgtgaccgaaaggtaagatggagagccttgttcttggtgtcaacgagaaaacacacgtccaactcagtttgcctgtccttcaggttagagacgtgctagtgcgtggcttcggggactctgtggaagaggccctatcggaggcacgtgaacacctcaaaaatggcacttgtggtctagtagagctggaaaaaggcgtactgccccagcttgaacagccctatgtgttcattaaacgttctgatgccttaagcaccaatcacggccacaaggtcgttgagctggttgcagaaatggacggcattcagtacggtcgtagcggtataacactgggagtactcgtgccacatgtgggcgaaaccccaattgcataccgcartgttcttcttcgtaagaacggtaataagggagccggtggtcatagctatggcatcgatctaaagtcttatgacttaggtgacgagcttggcactgatcccattgaagattatgaacaaaactggaacactaagcatggcagtggtgcactccgtgaactcactcgtgagctcaatggaggtgcagtcactcgctatgtcgacaacaatttctgtggcccagatgggtaccctcttgattgcatcaaagattttctcgcacgcgcgggcaagtcaatgtgcactctttccgaacaacttgattacatcgagtcgaagagaggtgtctactgctgccgtgaccatgagcatgaaattgcctggttcactgagcgctctgataagagctacgagcaccagacacccttcgaaattaagagtgccaagaaatttgacactttcaaaggggaatgcccaaagtttgtgtttcctcttaactcaaaagtcaaagtcattcaaccacgtgttgaaaagaaaaagactgagggtttcatggggcgtatacgctctgtgtaccctgttgcatctccacaggagtgtaacaatatgcacttgtctaccttgatgaaatgtaatcattgcgatgaagtttcatggcagacgtgcgactttctgaaagccacttgtgaacattgtggcactgaaaatttagttattgaaggacctactacatgtgggtacctacctactaatgctgtagtgaaaatgccatgtcctgcctgtcaagacccagagattggacctgagcatagtgttgcagattatcacaaccactcaaacattgaaactcgactccgcaagggaggtaggactagatgttttggaggctgtgtgtttgcctatgttggctgctataataagcgtgcctactgggttcctcgtgctagtgctgatattggctcaggccatactggcattactggtgacaatgtggagaccttgaatgaggatctccttgagatactgagtcgtgaacgtgttaacattaacattgttggcgattttcatttgaatgaagaggttgccatcattttggcatctttctctgcttctacaagtgcctttattgacactataaagagtcttgattacaagtctttcaaaaccattgttgagtcctgcggtaactataaagttaccaagggaaagcccgtaaaaggtgcttggaacattggacaacagagatcagttttaacaccactgtgtggttttccctcacaggctgctggtgttatcagatcaatttttgcgcgcacacttgatgcagcaaaccactcaattcctgatttgcaaagagcagctgtcaccatacttgatggtatttctgaacagtcattacgtcttgtcgacgccatggtttatacttcagacctgctcaccaacagtgtcattattatggcatatgtaactggtggtcttgtacaacagacttctcagtggttgtctaatcttttgggcactactgttgaaaaactcaggcctatctttgaatggattgaggcgaaacttagtgcaggagttgaatttctcaaggatgcttgggagattctcaaatttctcattacaggtgtttttgacatcgtcaagggtcaaatacaggttgcttcagataacatcaaggattgtgtaaaatgcttcattgatgttgttaacaaggcactcgaaatgtgcattgatcaagtcactatcgctggcgcaaagttgcgatcactcaacttaggtgaagtcttcatcgctcaaagcaagggactttaccgtcagtgtatacgtggcaaggagcagctgcaactactcatgcctcttaaggcaccaaaagaagtaacctttcttgaaggtgattcacatgacacagtacttacctctgaggaggttgttctcaagaacggtgaactcgaagcactcgagacgcccgttgatagcttcacaaatggagctatcgttggcacaccagtctgtgtaaatggcctcatgctcttagagattaaggacaaagaacaatactgcgcattgtctcctggtttactggctacaaacaatgtctttcgcttaaaagggggtgcaccaattaaaggtgtaacctttggagaagatactgtttgggaagttcaaggttacaagaatgtgagaatcacatttgagcttgatgaacgtgttgacaaagtgcttaatgaaaagtgctctgtctacactgttgaatccggtaccgaagttactgagtttgcatgtgttgtagcagaggctgttgtgaagactttacaaccagtttctgatctccttaccaacatgggtattgatcttgatgagtggagtgtagctacattctacttatttgatgatgctggtgaagaaaacttttcatcacgtatgtattgttccttttaccctccagatgaggaagaagaggacgatgcagagtgtgaggaagaagaaattgatgaaacctgtgaacatgagtacggtacagaggatgattatcaaggtctccctctggaatttggtgcctcagctgaaacagttcgagttgaggaagaagaagaggaagactggctggatgatactactgagcaatcagagattgagccagaaccagaacctacacctgaagaaccagttaatcagtttactggttatttaaaacttactgacaatgttgccattaaatgtgttgacatcgttaaggaggcacaaagtgctaatcctatggtgattgtaaatgctgctaacatacacctgaaacatggtggtggtgtagcaggtgcactcaacaaggcaaccaatggtgccatgcaaaaggagagtgatgattacattaagctaaatggccctcttacagtaggagggtcttgtttgctttctggacataatcttgctaagaagtgtctgcatgttgttggacctaacctaaatgcaggtgaggacatccagcttcttaaggcagcatatgaaaatttcaattcacaggacatcttacttgcaccattgttgtcagcaggcatatttggtgctaaaccacttcagtctttacaagtgtgcgtgcagacggttcgtacacaggtttatattgcagtcaatgacaaagctctttatgagcaggttgtcatggattatcttgataacctgaagcctagagtggaagcacctaaacaagaggagccaccaaacacagaagattccaaaactgaggagaaatccgtcgtacagaagcctgtcgatgtgaagccaaaaattaaggcctgcattgatgaggttaccacaacactggaagaaactaagtttcttaccaataagttactcttgtttgctgatatcaatggtaagctttaccatgattctcagaacatgcttagaggtgaagatatgtctttccttgagaaggatgcaccttacatggtaggtgatgttatcactagtggtgatatcacttgtgttgtaataccctccaaaaaggctggtggcactactgagatgctctcaagagctttgaagaaagtgccagttgatgagtatataaccacgtaccctggacaaggatgtgctggttatacacttgaggaagctaagactgctcttaagaaatgcaaatctgcattttatgtactaccttcagaagcacctaatgctaaggaagagattctaggaactgtatcctggaatttgagagaaatgcttgctcatgctgaagagacaagaaaattaatgcctatatgcatggatgttagagccataatggcaaccatccaacgtaagtataaaggaattaaaattcaagagggcatcgttgactatggtgtccgattcttcttttatactagtaaagagcctgtagcttctattattacgaagctgaactctctaaatgagccgcttgtcacaatgccaattggttatgtgacacatggttttaatcttgaagaggctgcgcgctgtatgcgttctcttaaagctcctgccgtagtgtcagtatcatcaccagatgctgttactacatataatggatacctcacttcgtcatcaaagacatctgaggagcactttgtagaaacagtttctttggctggctcttacagagattggtcctattcaggacagcgtacagagttaggtgttgaatttcttaagcgtggtgacaaaattgtgtaccacactctggagagccccgtcgagtttcatcttgacggtgaggttctttcacttgacaaactaaagagtctcttatccctgcgggaggttaagactataaaagtgttcacaactgtggacaacactaatctccacacacagcttgtggatatgtctatgacatatggacagcagtttggtccaacatacttggatggtgctgatgttacaaaaattaaacctcatgtaaatcatgagggtaagactttctttgtactacctagtgatgacacactacgtagtgaagctttcgagtactaccatactcttgatgagagttttcttggtaggtacatgtctgctttaaaccacacaaagaaatggaaatttcctcaagttggtggtttaacttcaattaaatgggctgataacaattgttatttgtctagtgttttattagcacttcaacagcttgaagtcaaattcaatgcaccagcacttcaagaggcttattatagagcccgtgctggtgatgctgctaacttttgtgcactcatactcgcttacagtaataaaactgttggcgagcttggtgatgtcagagaaactatgacccatcttctacagcatgctaatttggaatctgcaaagcgagttcttaatgtggtgtgtaaacattgtggtcagaaaactactaccttaacgggtgtagaagctgtgatgtatatgggtactctatcttatgataatcttaagacaggtgtttccattccatgtgtgtgtggtcgtgatgctacacaatatctagtacaacaagagtcttcttttgttatgatgtctgcaccacctgctgagtataaattacagcaaggtacattcttatgtgcgaatgagtacactggtaactatcagtgtggtcattacactcatataactgctaaggagaccctctatcgtattgacggagctcaccttacaaagatgtcagagtacaaaggaccagtgactgatgttttctacaaggaaacatcttacactacaaccatcaagcctgtgtcgtataaactcgatggagttacttacacagagattgaaccaaaattggatgggtattataaaaaggataatgcttactatacagagcagcctatagaccttgtaccaactcaaccattaccaaatgcgagttttgataatttcaaactcacatgttctaacacaaaatttgctgatgatttaaatcaaatgacaggcttcacaaagccagcttcacgagagctatctgtcacattcttcccagacttgaatggcgatgtagtggctattgactatagacactattcagcgagtttcaagaaaggtgctaaattactgcataagccaattgtttggcacattaaccaggctacaaccaagacaacgttcaaaccaaacacttggtgtttacgttgtctttggagtacaaagccagtagatacttcaaattcatttgaagttctggcagtagaagacacacaaggaatggacaatcttgcttgtgaaagtcaacaacccacctctgaagaagtagtggaaaatcctaccatacagaaggaagtcatagagtgtgacgtgaaaactaccgaagttgtaggcaatgtcatacttaaaccatcagatgaaggtgttaaagtaacacaagagttaggtcatgaggatcttatggctgcttatgtggaaaacacaagcattaccattaagaaacctaatgagctttcactagccttaggtttaaaaacaattgccactcatggtattgctgcaattaatagtgttccttggagtaaaattttggcttatgtcaaaccattcttaggacaagcagcaattacaacatcaaattgcgctaagagattagcacaacgtgtgtttaacaattatatgccttatgtgtttacattattgttccaattgtgtacttttactaaaagtaccaattctagaattagagcttcactacctacaactattgctaaaaatagtgttaagagtgttgctaaattatgtttggatgccggcattaattatgtgaagtcacccaaattttctaaattgttcacaatcgctatgtggctattgttgttaagtatttgcttaggttctctaatctgtgtaactgctgcttttggtgtactcttatctaattttggtgctccttcttattgtaatggcgttagagaattgtatcttaattcgtctaacgttactactatggatttctgtgaaggttcttttccttgcagcatttgtttaagtggattagactcccttgattcttatccagctcttgaaaccattcaggtgacgatttcatcgtacaagctagacttgacaattttaggtctggccgctgagtgggttttggcatatatgttgttcacaaaattcttttatttattaggtctttcagctataatgcaggtgttctttggctattttgctagtcatttcatcagcaattcttggctcatgtggtttatcattagtattgtacaaatggcacccgtttctgcaatggttaggatgtacatcttctttgcttctttctactacatatggaagagctatgttcatatcatggatggttgcacctcttcgacttgcatgatgtgctataagcgcaatcgtgccacacgcgttgagtgtacaactattgttaatggcatgaagagatctttctatgtctatgcaaatggaggccgtggcttctgcaagactcacaattggaattgtctcaattgtgacacattttgcactggtagtacattcattagtgatgaagttgctcgtgatttgtcactccagtttaaaagaccaatcaaccctactgaccagtcatcgtatattgttgatagtgttgctgtgaaaaatggcgcgcttcacctctactttgacaaggctggtcaaaagacctatgagagacatccgctctcccattttgtcaatttagacaatttgagagctaacaacactaaaggttcactgcctattaatgtcatagtttttgatggcaagtccaaatgcgacgagtctgcttctaagtctgcttctgtgtactacagtcagctgatgtgccaacctattctgttgcttgaccaagctcttgtatcagacgttggagatagtactgaagtttccgttaagatgtttgatgcttatgtcgacaccttttcagcaacttttagtgttcctatggaaaaacttaaggcacttgttgctacagctcacagcgagttagcaaagggtgtagctttagatggtgtcctttctacattcgtgtcagctgcccgacaaggtgttgttgataccgatgttgacacaaaggatgttattgaatgtctcaaactttcacatcactctgacttagaagtgacaggtgacagttgtaacaatttcatgctcacctataataaggttgaaaacatgacgcccagagatcttggcgcatgtattgactgtaatgcaaggcatatcaatgcccaagtagcaaaaagtcacaatgtttcactcatctggaatgtaaaagactacatgtctttatctgaacagctgcgtaaacaaattcgtagtgctgccaagaagaacaacataccttttagactaacttgtgctacaactagacaggttgtcaatgtcataactactaaaatctcactcaagggtggtaagattgttagtacttgttttaaacttatgcttaaggccacattattgtgcgttcttgctgcattggtttgttatatcgttatgccagtacatacattgtcaatccatgatggttacacaaatgaaatcattggttacaaagccattcaggatggtgtcactcgtgacatcatttctactgatgattgttttgcaaataaacatgctggttttgacgcatggtttagccagcgtggtggttcatacaaaaatgacaaaagctgccctgtagtagctgctatcattacaagagagattggtttcatagtgcctggcttaccgggtactgtgctgagagcaatcaatggtgacttcttgcattttctacctcgtgtttttagtgctgttggcaacatttgctacacaccttccaaactcattgagtatagtgattttgctacctctgcttgcgttcttgctgctgagtgtacaatttttaaggatgctatgggcaaacctgtgccatattgttatgacactaatttgctagagggttctatttcttatagtgagcttcgtccagacactcgttatgtgcttatggatggttccatcatacagtttcctaacacttacctggagggttctgttagagtagtaacaacttttgatgctgagtactgtagacatggtacatgcgaaaggtcagaagtaggtatttgcctatctaccagtggtagatgggttcttaataatgagcattacagagctctatcaggagttttctgtggtgttgatgcgatgaatctcatagctaacatctttactcctcttgtgcaacctgtgggtgctttagatgtgtctgcttcagtagtggctggtggtattattgccatattggtgacttgtgctgcctactactttatgaaattcagacgtgtttttggtgagtacaaccatgttgttgctgctaatgcacttttgtttttgatgtctttcactatactctgtctggtaccagcttacagctttctgccgggagtctactcagtcttttacttgtacttgacattctatttcaccaatgatgtttcattcttggctcaccttcaatggtttgccatgttttctcctattgtgcctttttggataacagcaatctatgtattctgtatttctctgaagcactgccattggttctttaacaactatcttaggaaaagagtcatgtttaatggagttacatttagtaccttcgaggaggctgctttgtgtacctttttgctcaacaaggaaatgtacctaaaattgcgtagcgagacactgttgccacttacacagtataacaggtatcttgctctatataacaagtacaagtatttcagtggagccttagatactaccagctatcgtgaagcagcttgctgccacttagcaaaggctctaaatgactttagcaactcaggtgctgatgttctctaccaaccaccacagacatcaatcacttctgctgttctgcagagtggttttaggaaaatggcattcccgtcaggcaaagttgaagggtgcatggtacaagtaacctgtggaactacaactcttaatggattgtggttggatgacacagtatactgtccaagacatgtcatttgcacagcagaagacatgcttaatcctaactatgaagatctgctcattcgcaaatccaaccatagctttcttgttcaggctggcaatgttcaacttcgtgttattggccattctatgcaaaattgtctgcttaggcttaaagttgatacttctaaccctaagacacccaagtataaatttgtccgtatccaacctggtcaaacattttcagttctagcatgctacaatggttcaccatctggtgtttatcagtgtgccatgagacctaatcataccattaaaggttctttccttaatggatcatgtggtagtgttggttttaacattgattatgattgcgtgtctttctgctatatgcatcatatggagcttccaacaggagtacacgctggtactgacttagaaggtaaattctatggtccatttgttgacagacaaactgcacaggctgcaggtacagacacaaccataacattaaatgttttggcatggctgtatgctgctgttatcaatggtgataggtggtttcttaatagattcaccactactttgaatgactttaaccttgtggcaatgaagtacaactatgaacctttgacacaagatcatgttgacatattgggacctctttctgctcaaacaggaattgccgtcttagatatgtgtgctgctttgaaagagctgctgcagaatggtatgaatggtcgtactatccttggtagcactattttagaagatgagtttacaccatttgatgttgttagacaatgctctggtgttaccttccaaggtaagttcaagaaaattgttaagggcactcatcattggatgcttttaactttcttgacatcactattgattcttgttcaaagtacacagtggtcactgtttttctttgtttacgagaatgctttcttgccatttactcttggtattatggcaattgctgcatgtgctatgctgcttgttaagcataagcacgcattcttgtgcttgtttctgttaccttctcttgcaacagttgcttactttaatatggtctacatgcctgctagctgggtgatgcgtatcatgacatggcttgaattggctgacactagcttgtctggttataggcttaaggattgtgttatgtatgcttcagctttagttttgcttattctcatgacagctcgcactgtttatgatgatgctgctagacgtgtttggacactgatgaatgtcattacacttgtttacaaagtctactatggtaatgctttagatcaagctatttccatgtgggccttagttatttctgtaacctctaactattctggtgtcgttacgactatcatgtttttagctagagctatagtgtttgtgtgtgttgagtattatccattgttatttattactggcaacaccttacagtgtatcatgcttgtttattgtttcttaggctattgttgctgctgctactttggccttttctgtttactcaaccgttacttcaggcttactcttggtgtttatgactacttggtctctacacaagaatttaggtatatgaactcccaggggcttttgcctcctaagagtagtattgatgctttcaagcttaacattaagttgttgggtattggaggtaaaccatgtatcaaggttgctactgtacagtctaaaatgtctgacgtaaagtgcacatctgtggtactgctctcggttcttcaacaacttagagtagagtcatcttctaaattgtgggcacaatgtgtacaactccacaatgatattcttcttgcaaaagacacaactgaagctttcgagaagatggtttctcttttgtctgttttgctatccatgcagggtgctgtagacattaataggttgtgcgaggaaatgctcgataaccgtgctactcttcaggctattgcttcagaatttagttctttaccatcatatgccgcttatgccactgcccaggaggcctatgagcaggctgtagctaatggtgattctgaagtcgttctcaaaaagttaaagaaatctttgaatgtggctaaatctgagtttgaccgtgatgctgccatgcaacgcaagttggaaaagatggcagatcaggctatgacccaaatgtacaaacaggcaagatctgaggacaagagggcaaaagtaactagtgctatgcaaacaatgctcttcactatgcttaggaagcttgataatgatgcacttaacaacattatcaacaatgcgcgtgatggttgtgttccactcaacatcataccattgactacagcagccaaactcatggttgttgtccctgattatggtacctacaagaacacttgtgatggtaacacctttacatatgcatctgcactctgggaaatccagcaagttgttgatgcggatagcaagattgttcaacttagtgaaattaacatggacaattcaccaaatttggcttggcctcttattgttacagctctaagagccaactcagctgttaaactacagaataatgaactgagtccagtagcactacgacagatgtcctgtgcggctggtaccacacaaacagcttgtactgatgacaatgcacttgcctactataacaattcgaagggaggtaggtttgtgctggcattactatcagaccaccaagatctcaaatgggctagattccctaagagtgatggtacaggtacaatttacacagaactggaaccaccttgtaggtttgttacagacacaccaaaagggcctaaagtgaaatacttgtacttcatcaaaggcttaaacaacctaaatagaggtatggtgctgggcagtttagctgctacagtacgtcttcaggctggaaatgctacagaagtacctgccaattcaactgtgctttccttctgtgcttttgcagtagaccctgctaaagcatataaggattacctagcaagtggaggacaaccaatcaccaactgtgtgaagatgttgtgtacacacactggtacaggacaggcaattactgtaacaccagaagctaacatggaccaagagtcctttggtggtgcttcatgttgtctgtattgtagatgccacattgaccatccaaatcctaaaggattctgtgacttgaaaggtaagtacgtccaaatacctaccacttgtgctaatgacccagtgggttttacacttagaaacacagtctgtaccgtctgcggaatgtggaaaggttatggctgtagttgtgaccaactccgcgaacccttgatgcagtctgcggatgcatcaacgtttttaaacgggtttgcggtgtaagtgcagcccgtcttacaccgtgcggcacaggcactagtactgatgtcgtctacagggcttttgatatttacaacgaaaaagttgctggttttgcaaagttcctaaaaactaattgctgtcgcttccaggagaaggatgaggaaggcaatttattagactcttactttgtagttaagaggcatactatgtctaactaccaacatgaagagactatttataacttggttaaagattgtccagcggttgctgtccatgactttttcaagtttagagtagatggtgacatggtaccacatatatcacgtcagcgtctaactaaatacacaatggctgatttagtctatgctctacgtcattttgatgagggtaattgtgatacattaaaagaaatactcgtcacatacaattgctgtgatgatgattatttcaataagaaggattggtatgacttcgtagagaatcctgacatcttacgcgtatatgctaacttaggtgagcgtgtacgccaatcattattaaagactgtacaattctgcgatgctatgcgtgatgcaggcattgtaggcgtactgacattagataatcaggatcttaatgggaactggtacgatttcggtgatttcgtacaagtagcaccaggctgcggagttcctattgtggattcatattactcattgctgatgcccatcctcactttgactagggcattggctgctgagtcccatatggatgctgatctcgcaaaaccacttattaagtgggatttgctgaaatatgattttacggaagagagactttgtctcttcgaccgttattttaaatattgggaccagacataccatcccaattgtattaactgtttggatgataggtgtatccttcattgtgcaaactttaatgtgttattttctactgtgtttccacctacaagttttggaccactagtaagaaaaatatttgtagatggtgttccttttgttgtttcaactggataccattttcgtgagttaggagtcgtacataatcaggatgtaaacttacatagctcgcgtctcagtttcaaggaacttttagtgtatgctgctgatccagctatgcatgcagcttctggcaatttattgctagataaacgcactacatgcttttcagtagctgcactaacaaacaatgttgcttttcaaactgtcaaacccggtaattttaataaagacttttatgactttgctgtgtctaaaggtttctttaaggaaggaagttctgttgaactaaaacacttcttctttgctcaggatggcaacgctgctatcagtgattatgactattatcgttataatctgccaacaatgtgtgatatcagacaactcctattcgtagttgaagttgttgataaatactttgattgttacgatggtggctgtattaatgccaaccaagtaatcgttaacaatctggataaatcagctggtttcccatttaataaatggggtaaggctagactttattatgactcaatgagttatgaggatcaagatgcacttttcgcgtatactaagcgtaatgtcatccctactataactcaaatgaatcttaagtatgccattagtgcaaagaatagagctcgcaccgtagctggtgtctctatctgtagtactatgacaaatagacagtttcatcagaaattattgaagtcaatagccgccactagaggagctactgtggtaattggaacaagcaagttttacggtggctggcataatatgttaaaaactgtttacagtgatgtagaaactccacaccttatgggttgggattatccaaaatgtgacagagccatgcctaacatgcttaggataatggcctctcttgttcttgctcgcaaacataacacttgctgtaacttatcacaccgtttctacaggttagctaacgagtgtgcgcaagtattaagtgagatggtcatgtgtggcggctcactatatgttaaaccaggtggaacatcatccggtgatgctacaactgcttatgctaatagtgtctttaacatttgtcaagctgttacagccaatgtaaatgcacttctttcaactgatggtaataagatagctgacaagtatgtccgcaatctacaacacaggctctatgagtgtctctatagaaatagggatgttgatcatgaattcgtggatgagttttacgcttacctgcgtaaacatttctccatgatgattctttctgatgatgccgttgtgtgctataacagtaactatgcggctcaaggtttagtagctagcattaagaactttaaggcagttctttattatcaaaataatgtgttcatgtctgaggcaaaatgttggactgagactgaccttactaaaggacctcacgaattttgctcacagcatacaatgctagttaaacaaggagatgattacgtgtacctgccttacccagatccatcaagaatattaggcgcaggctgttttgtcgatgatattgtcaaaacagatggtacacttatgattgaaaggttcgtgtcactggctattgatgcttacccacttacaaaacatcctaatcaggagtatgctgatgtctttcacttgtatttacaatacattagaaagttacatgatgagcttactggccacatgttggacatgtattccgtaatgctaactaatgataacacctcacggtactgggaacctgagttttatgaggctatgtacacaccacatacagtcttgcaggctgtaggtgcttgtgtattgtgcaattcacagacttcacttcgttgcggtgcctgtattaggagaccattcctatgttgcaagtgctgctatgaccatgtcatttcaacatcacacaaattagtgttgtctgttaatccctatgtttgcaatgccccaggttgtgatgtcactgatgtgacacaactgtatctaggaggtatgagctattattgcaagtcacataagcctcccattagttttccattatgtgctaatggtcaggtttttggtttatacaaaaacacatgtgtaggcagtgacaatgtcactgacttcaatgcgatagcaacatgtgattggactaatgctggcgattacatacttgccaacacttgtactgagagactcaagcttttcgcagcagaaacgctcaaagccactgaggaaacatttaagctgtcatatggtattgccactgtacgcgaagtactctctgacagagaattgcatctttcatgggaggttggaaaacctagaccaccattgaacagaaactatgtctttactggttaccgtgtaactaaaaatagtaaagtacagattggagagtacacctttgaaaaaggtgactatggtgatgctgttgtgtacagaggtactacgacatacaagttgaatgttggtgattactttgtgttgacatctcacactgtaatgccacttagtgcacctactctagtgccacaagagcactatgtgagaattactggcttgtacccaacactcaacatctcagatgagttttctagcaatgttgcaaattatcaaaaggtcggcatgcaaaagtactctacactccaaggaccacctggtactggtaagagtcattttgccatcggacttgctctctattacccatctgctcgcatagtgtatacggcatgctctcatgcagctgttgatgccctatgtgaaaaggcattaaaatatttgcccatagataaatgtagtagaatcatacctgcgcgtgcgcgcgtagagtgttttgataaattcaaagtgaattcaacactagaacagtatgttttctgcactgtaaatgcattgccagaaacaactgctgacattgtagtctttgatgaaatctctatggctactaattatgacttgagtgttgtcaatgctagacttcgtgcaaaacactacgtctatattggcgatcctgctcaattaccagccccccgcacattgctgactaaaggcacactagaaccagaatattttaattcagtgtgcagacttatgaaaacaataggtccagacatgttccttggaacttgtcgccgttgtcctgctgaaattgttgacactgtgagtgctttagtttatgacaataagctaaaagcacacaaggataagtcagctcaatgcttcaaaatgttctacaaaggtgttattacacatgatgtttcatctgcaatcaacagacctcaaataggcgttgtaagagaatttcttacacgcaatcctgcttggagaaaagctgtttttatctcaccttataattcacagaacgctgtagcttcaaaaatcttaggattgcctacgcagactgttgattcatcacagggttctgaatatgactatgtcatattcacacaaactactgaaacagcacactcttgtaatgtcaaccgcttcaatgtggctatcacaagggcaaaaattggcattttgtgcataatgtctgatagagatctttatgacaaactgcaatttacaagtctagaaataccacgtcgcaatgtggctacattacaagcagaaaatgtaactggactttttaaggactgtagtaagatcattactggtcttcatcctacacaggcacctacacacctcagcgttgatataaagttcaagactgaaggattatgtgttgacataccaggcataccaaaggacatgacctaccgtagactcatctctatgatgggtttcaaaatgaattaccaagtcaatggttaccctaatatgtttatcacccgcgaagaagctattcgtcacgttcgtgcgtggattggctttgatgtagagggctgtcatgcaactagagatgctgtgggtactaacctacctctccagctaggattttctacaggtgttaacttagtagctgtaccgactggttatgttgacactgaaaataacacagaattcaccagagttaatgcaaaacctccaccaggtgaccagtttaaacatcttataccactcatgtataaaggcttgccctggaatgtagtgcgtattaagatagtacaaatgctcagtgatacactgaaaggattgtcagacagagtcgtgttcgtcctttgggcgcatggctttgagcttacatcaatgaagtactttgtcaagattggacctgaaagaacgtgttgtctgtgtgacaaacgtgcaacttgcttttctacttcatcagatacttatgcctgctggaatcattctgtgggttttgactatgtctataacccatttatgattgatgttcagcagtggggctttacgggtaaccttcagagtaaccatgaccaacattgccaggtacatggaaatgcacatgtggctagttgtgatgctatcatgactagatgtttagcagtccatgagtgctttgttaagcgcgttgattggtctgttgaataccctattataggagatgaactgagggttaattctgcttgcagaaaagtacaacacatggttgtgaagtctgcattgcttgctgataagtttccagttcttcatgacattggaaatccaaaggctatcaagtgtgtgcctcaggctgaagtagaatggaagttctacgatgctcagccatgtagtgacaaagcttacaaaatagaggaactcttctattcttatgctacacatcacgataaattcactgatggtgtttgtttgttttggaattgtaacgttgatcgttacccagccaatgcaattgtgtgtaggtttgacacaagagtcttgtcaaacttgaacttaccaggctgtgatggtggtagtttgtatgtgaataagcatgcattccacactccagctttcgataaaagtgcatttactaatttaaagcaattgcctttcttttactattctgatagtccttgtgagtctcatggcaaacaagtagtgtcggatattgattatgttccactcaaatctgctacgtgtattacacgatgcaatttaggtggtgctgtttgcagacaccatgcaaatgagtaccgacagtacttggatgcatataatatgatgatttctgctggatttagcctatggatttacaaacaatttgatacttataacctgtggaatacatttaccaggttacagagtttagaaaatgtggcttataatgttgttaataaaggacactttgatggacacgccggcgaagcacctgtttccatcattaataatgctgtttacacaaaggtagatggtattgatgtggagatctttgaaaataagacaacacttcctgttaatgttgcatttgagctttgggctaagcgtaacattaaaccagtgccagagattaagatactcaataatttgggtgttgatatcgctgctaatactgtaatctgggactacaaaagagaagccccagcacatgtatctacaataggtgtctgcacaatgactgacattgccaagaaacctactgagagtgcttgttcttcacttactgtcttgtttgatggtagagtggaaggacaggtagacctttttagaaacgcccgtaatggtgttttaataacagaaggttcagtcaaaggtctaacaccttcaaagggaccagcacaagctagcgtcaatggagtcacattaattggagaatcagtaaaaacacagtttaactactttaagaaagtagacggcattattcaacagttgcctgaaacctactttactcagagcagagacttagaggattttaagcccagatcacaaatggaaactgactttctcgagctcgctatggatgaattcatacagcgatataagctcgagggctatgccttcgaacacatcgtttatggagatttcagtcatggacaacttggcggtcttcatttaatgataggcttagccaagcgctcacaagattcaccacttaaattagaggattttatccctatggacagcacagtgaaaaattacttcataacagatgcgcaaacaggttcatcaaaatgtgtgtgttctgtgattgatcttttacttgatgactttgtcgagataataaagtcacaagatttgtcagtgatttcaaaagtggtcaaggttacaattgactatgctgaaatttcattcatgctttggtgtaaggatggacatgttgaaaccttctacccaaaactacaagcaagtcaagcgtggcaaccaggtgttgcgatgcctaacttgtacaagatgcaaagaatgcttcttgaaaagtgtgaccttcagaattatggtgaaaatgctgttataccaaaaggaataatgatgaatgtcgcaaagtatactcaactgtgtcaatacttaaatacacttactttagctgtaccctacaacatgagagttattcactttggtgctggctctgataaaggagttgcaccaggtacagctgtgctcagacaatggttgccaactggcacactacttgtcgattcagatcttaatgacttcgtctccgacgcagattctactttaattggagactgtgcaacagtacatacggctaataaatgggaccttattattagcgatatgtatgaccctaggaccaaacatgtgacaaaagagaatgactctaaagaagggtttttcacttatctgtgtggatttataaagcaaaaactagccctgggtggttctatagctgtaaagataacagagcattcttggaatgctgacctttacaagcttatgggccatttctcatggtggacagcttttgttacaaatgtaaatgcatcatcatcggaagcatttttaattggggctaactatcttggcaagccgaaggaacaaattgatggctataccatgcatgctaactacattttctggaggaacacaaatcctatccagttgtcttcctattcactctttgacatgagcaaatttcctcttaaattaagaggaactgctgtaatgtctcttaaggagaatcaaatcaatgatatgatttattctcttctggaaaaaggtaggcttatcattagagaaaacaacagagttgtggtttcaagtgatattcttgttaacaactaaacgaacatgtttattttcttattatttcttactctcactagtggtagtgaccttgaccggtgcaccacttttgatgatgttcaagctcctaattacactcaacatacttcatctatgaggggggtttactatcctgatgaaatttttagatcagacactctttatttaactcaggatttatttcttccattttattctaatgttacagggtttcatactattaatcatacgtttggcaaccctgtcataccttttaaggatggtatttattttgctgccacagagaaatcaaatgttgtccgtggttgggtttttggttctaccatgaacaacaagtcacagtcggtgattattattaacaattctactaatgttgttatacgagcatgtaactttgaattgtgtgacaaccctttctttgctgtttctaaacccatgggtacacagacacatactatgatattcgataatgcatttaattgcactttcgagtacatatctgatgccttttcgcttgatgtttcagaaaagtcaggtaattttaaacacttacgagagtttgtgtttaaaaataaagatgggtttctctatgtttataagggctatcaacctatagatgtagttcgtgatctaccttctggttttaacactttgaaacctatttttaagttgcctcttggtattaacattacaaattttagagccattcttacagccttttcacctgctcaagacatttggggcacgtcagctgcagcctattttgttggctatttaaagccaactacatttatgctcaagtatgatgaaaatggtacaatcacagatgctgttgattgttctcaaaatccacttgctgaactcaaatgctctgttaagagctttgagattgacaaaggaatttaccagacctctaatttcagggttgttccctcaggagatgttgtgagattccctaatattacaaacttgtgtccttttggagaggtttttaatgctactaaattcccttctgtctatgcatgggagagaaaaaaaatttctaattgtgttgctgattactctgtgctctacaactcaacatttttttcaacctttaagtgctatggcgtttctgccactaagttgaatgatctttgcttctccaatgtctatgcagattcttttgtagtcaagggagatgatgtaagacaaatagcgccaggacaaactggtgttattgctgattataattataaattgccagatgatttcatgggttgtgtccttgcttggaatactaggaacattgatgctacttcaactggtaattataattataaatataggtatcttagacatggcaagcttaggccctttgagagagacatatctaatgtgcctttctcccctgatggcaaaccttgcaccccacctgctcttaattgttattggccattaaatgattatggtttttacaccactactggcattggctaccaaccttacagagttgtagtactttcttttgaacttttaaatgcaccggccacggtttgtggaccaaaattatccactgaccttattaagaaccagtgtgtcaattttaattttaatggactcactggtactggtgtgttaactccttcttcaaagagatttcaaccatttcaacaatttggccgtgatgtttctgatttcactgattccgttcgagatcctaaaacatctgaaatattagacatttcaccttgctcttttgggggtgtaagtgtaattacacctggaacaaatgcttcatctgaagttgctgttctatatcaagatgttaactgcactgatgtttctacagcaattcatgcagatcaactcacaccagcttggcgcatatattctactggaaacaatgtattccagactcaagcaggctgtcttataggagctgagcatgtcgacacttcttatgagtgcgacattcctattggagctggcatttgtgctagttaccatacagtttctttattacgtagtactagccaaaaatctattgtggcttatactatgtctttaggtgctgatagttcaattgcttactctaataacaccattgctatacctactaacttttcaattagcattactacagaagtaatgcctgtttctatggctaaaacctccgtagattgtaatatgtacatctgcggagattctactgaatgtgctaatttgcttctccaatatggtagcttttgcacacaactaaatcgtgcactctcaggtattgctgctgaacaggatcgcaacacacgtgaagtgttcgctcaagtcaaacaaatgtacaaaaccccaactttgaaatattttggtggttttaatttttcacaaatattacctgaccctctaaagccaactaagaggtcttttattgaggacttgctctttaataaggtgacactcgctgatgctggcttcatgaagcaatatggcgaatgcctaggtgatattaatgctagagatctcatttgtgcgcagaagttcaatggacttacagtgttgccacctctgctcactgatgatatgattgctgcctacactgctgctctagttagtggtactgccactgctggatggacatttggtgctggcgctgctcttcaaataccttttgctatgcaaatggcatataggttcaatggcattggagttacccaaaatgttctctatgagaaccaaaaacaaatcgccaaccaatttaacaaggcgattagtcaaattcaagaatcacttacaacaacatcaactgcattgggcaagctgcaagacgttgttaaccagaatgctcaagcattaaacacacttgttaaacaacttagctctaattttggtgcaatttcaagtgtgctaaatgatatcctttcgcgacttgataaagtcgaggcggaggtacaaattgacaggttaattacaggcagacttcaaagccttcaaacctatgtaacacaacaactaatcagggctgctgaaatcagggcttctgctaatcttgctgctactaaaatgtctgagtgtgttcttggacaatcaaaaagagttgacttttgtggaaagggctaccaccttatgtccttcccacaagcagccccgcatggtgttgtcttcctacatgtcacgtatgtgccatcccaggagaggaacttcaccacagcgccagcaatttgtcatgaaggcaaagcatacttccctcgtgaaggtgtttttgtgtttaatggcacttcttggtttattacacagaggaacttcttttctccacaaataattactacagacaatacatttgtctcaggaaattgtgatgtcgttattggcatcattaacaacacagtttatgatcctctgcaacctgagcttgactcattcaaagaagagctggacaagtacttcaaaaatcatacatcaccagatgttgatcttggcgacatttcaggcattaacgcttctgtcgtcaacattcaaaaagaaattgaccgcctcaatgaggtcgctaaaaatttaaatgaatcactcattgaccttcaagaattgggaaaatatgagcaatatattaaatggccttggtatgtttggctcggcttcattgctggactaattgccatcgtcatggttacaatcttgctttgttgcatgactagttgttgcagttgcctcaagggtgcatgctcttgtggttcttgctgcaagtttgatgaggatgactctgagccagttctcaagggtgtcaaattacattacacataaacgaacttatggatttgtttatgagattttttactcttggatcaattactgcacagccagtaaaaattgacaatgcttctcctgcaagtactgttcatgctacagcaacgataccgctacaagcctcactccctttcggatggcttgttattggcgttgcatttcttgctgtttttcagagcgctaccaaaataattgcgctcaataaaagatggcagctagccctttataagggcttccagttcatttgcaatttactgctgctatttgttaccatctattcacatcttttgcttgtcgctgcaggtatggaggcgcaatttttgtacctctatgccttgatatattttctacaatgcatcaacgcatgtagaattattatgagatgttggctttgttggaagtgcaaatccaagaacccattactttatgatgccaactactttgtttgctggcacacacataactatgactactgtataccatataacagtgtcacagatacaattgtcgttactgaaggtgacggcatttcaacaccaaaactcaaagaagactaccaaattggtggttattctgaggataggcactcaggtgttaaagactatgtcgttgtacatggctatttcaccgaagtttactaccagcttgagtctacacaaattactacagacactggtattgaaaatgctacattcttcatctttaacaagcttgttaaagacccaccgaatgtgcaaatacacacaatcgacggctcttcaggagttgctaatccagcaatggatccaatttatgatgagccgacgacgactactagcgtgcctttgtaagcacaagaaagtgagtacgaacttatgtactcattcgtttcggaagaaacaggtacgttaatagttaatagcgtacttctttttcttgctttcgtggtattcttgctagttacactagccatccttactgcgcttcgattgtgtgcgtactgctgcaatattgttaacgtgagtttagtaaaaccaacggtttacgtctactcgcgtgttaaaaatctgaactcttctgaaggagttcctgatcttctggtctaaacgaactaactattattattattctgtttggaactttaacattgcttatcatggcagacaacggtactattaccgttgaggagcttaaacaactcctggaacaatggaacctagtaataggtttcctatgcctagcctggattatgttactacaatttgcctattctaatcggaacaggtttttgtacataataaagcttgttttcctctggctcttgtggccagtaacacttgcttgttttgtgcttgctgctgtctacagaattaattgggtgactggcgggattgcgattgcaatggcttgtattgtaggcttgatgtggcttagctacttcgttgcttccttcaggctgtttgctcgtacccgctcaatgtggtcattcaacccagaaacaaacattcttctcaatgtgcctctccgggggacaattgtgaccagaccgctcatggaaagtgaacttgtcattggtgctgtgatcattcgtggtcacttgcgaatggccggacactccctagggcgctgtgacattaaggacctgccaaaagagatcactgtggctacatcacgaacgctttcttattacaaattaggagcgtcgcagcgtgtaggcactgattcaggttttgctgcatacaaccgctaccgtattggaaactataaattaaatacagaccacgccggtagcaacgacaatattgctttgctagtacagtaagtgacaacagatgtttcatcttgttgacttccaggttacaatagcagagatattgattatcattatgaggactttcaggattgctatttggaatcttgacgttataataagttcaatagtgagacaattatttaagcctctaactaagaagaattattcggagttagatgatgaagaacctatggagttagattatccataaaacgaacatgaaaattattctcttcctgacattgattgtatttacatcttgcgagctatatcactatcaggagtgtgttagaggtacgactgtactactaaaagaaccttgcccatcaggaacatacgagggcaattcaccatttcaccctcttgctgacaataaatttgcactaacttgcactagcacacactttgcttttgcttgtgctgacggtactcgacatacctatcagctgcgtgcaagatcagtttcaccaaaacttttcatcagacaagaggaggttcaacaagagctctactcgccactttttctcattgttgctgctctagtatttttaatactttgcttcaccattaagagaaagacagaatgaatgagctcactttaattgacttctatttgtgctttttagcctttctgctattccttgttttaataatgcttattatattttggttttcactcgaaatccaggatctagaagaaccttgtaccaaagtctaaacgaacatgaaacttctcattgttttgacttgtatttctttatgcagttgcatatgcactgtagtacagcgctgtgcatctaataaacctcatgtgcttgaagatccttgtaaggtacaacactaggggtaatacttatagcactgcttggctttgtgctctaggaaaggttttaccttttcatagatggcacactatggttcaaacatgcacacctaatgttactatcaactgtcaagatccagctggtggtgcgcttatagctaggtgttggtaccttcatgaaggtcaccaaactgctgcatttagagacgtacttgttgttttaaataaacgaacaaattaaaatgtctgataatggaccccaatcaaaccaacgtagtgccccccgcattacatttggtggacccacagattcaactgacaataaccagaatggaggacgcaatggggcaaggccaaaacagcgccgaccccaaggtttacccaataatactgcgtcttggttcacagctctcactcagcatggcaaggaggaacttagattccctcgaggccagggcgttccaatcaacaccaatagtggtccagatgaccaaattggctactaccgaagagctacccgacgagttcgtggtggtgacggcaaaatgaaagagctcagccccagatggtacttctattacctaggaactggcccagaagcttcacttccctacggcgctaacaaagaaggcatcgtatgggttgcaactgagggagccttgaatacacccaaagaccacattggcacccgcaatcctaataacaatgctgccaccgtgctacaacttcctcaaggaacaacattgccaaaaggcttctacgcagagggaagcagaggcggcagtcaagcctcttctcgctcctcatcacgtagtcgcggtaattcaagaaattcaactcctggcagcagtaggggaaattctcctgctcgaatggctagcggaggtggtgaaactgccctcgcgctattgctgctagacagattgaaccagcttgagagcaaagtttctggtaaaggccaacaacaacaaggccaaactgtcactaagaaatctgctgctgaggcatctaaaaagcctcgccaaaaacgtactgccacaaaacagtacaacgtcactcaagcatttgggagacgtggtccagaacaaacccaaggaaatttcggggaccaagacctaatcagacaaggaactgattacaaacattggccgcaaattgcacaatttgctccaagtgcctctgcattctttggaatgtcacgcattggcatggaagtcacaccttcgggaacatggctgacttatcatggagccattaaattggatgacaaagatccacaattcaaagacaacgtcatactgctgaacaagcacattgacgcatacaaaacattcccaccaacagagcctaaaaaggacaaaaagaaaaagactgatgaagctcagcctttgccgcagagacaaaagaagcagcccactgtgactcttcttcctgcggctgacatggatgatttctccagacaacttcaaaattccatgagtggagcttctgctgattcaactcaggcataaacactcatgatgaccacacaaggcagatgggctatgtaaacgttttcgcaattccgtttacgatacatagtctactcttgtgcagaatgaattctcgtaactaaacagcacaagtaggtttagttaactttaatctcacatagcaatctttaatcaatgtgtaacattagggaggacttgaaagagccaccacattttcatcgaggccacgcggagtacgatcgagggtacagtgaataatgctagggagagctgcctatatggaagagccctaatgtgtaaaattaattttagtagtgctatccccatgtgattttaatagcttcttaggagaatgacaa

SEQ ID NO: 29831 - DNA, 20 bp, Artificial Sequence
  Antisense compound
ggtaggtaaaaacctaatat

SEQ ID NO: 29832 - DNA, 20 bp, Artificial Sequence
  Antisense compound
tggttgcgaaaataaagggg

SEQ ID NO: 29833 - DNA, 20 bp, Artificial Sequence
  Antisense compound
gggtaggtaaaaacctaata

SEQ ID NO: 29834 - DNA, 9 bp, Artificial Sequence
  Antisense compound
agacgggct

SEQ ID NO: 29835 - DNA, 15 bp, Artificial Sequence
  Antisense compound
aaacgttgatgcatc

SEQ ID NO: 29836 - DNA, 15 bp, Artificial Sequence
  Antisense compound
aaaacgttgatgcat

SEQ ID NO: 29837 - DNA, 15 bp, Artificial Sequence
  Antisense compound
aaaaacgttgatgca

SEQ ID NO: 29838 - DNA, 15 bp, Artificial Sequence
  Antisense compound
taaaaacgttgatgc

SEQ ID NO: 29839 - DNA, 15 bp, Artificial Sequence
  Antisense compound
ttaaaaacgttgatg

SEQ ID NO: 29840 - DNA, 15 bp, Artificial Sequence
  Antisense compound
tttaaaaacgttgat

SEQ ID NO: 29841 - DNA, 15 bp, Artificial Sequence
  Antisense compound
gtttaaaaacgttga

SEQ ID NO: 29842 - DNA, 15 bp, Artificial Sequence
  Antisense compound
cgtttaaaaacgttg

SEQ ID NO: 29843 - DNA, 15 bp, Artificial Sequence
  Antisense compound
ccgtttaaaaacgtt

SEQ ID NO: 29844 - DNA, 15 bp, Artificial Sequence
  Antisense compound
cccgtttaaaaacgt

SEQ ID NO: 29845 - DNA, 15 bp, Artificial Sequence
  Antisense compound
acccgtttaaaaacg

SEQ ID NO: 29846 - DNA, 15 bp, Artificial Sequence
  Antisense compound
aacccgtttaaaaac

SEQ ID NO: 29847 - DNA, 15 bp, Artificial Sequence
  Antisense compound
aaacccgtttaaaaa

SEQ ID NO: 29848 - DNA, 15 bp, Artificial Sequence
  Antisense compound
caaacccgtttaaaa

SEQ ID NO: 29849 - DNA, 15 bp, Artificial Sequence
  Antisense compound
gcaaacccgtttaaa

SEQ ID NO: 29850 - DNA, 15 bp, Artificial Sequence
  Antisense compound
cgcaaacccgtttaa

SEQ ID NO: 29851 - DNA, 15 bp, Artificial Sequence
  Antisense compound
ccgcaaacccgttta

SEQ ID NO: 29852 - DNA, 15 bp, Artificial Sequence
  Antisense compound
accgcaaacccgttt

SEQ ID NO: 29853 - DNA, 15 bp, Artificial Sequence
  Antisense compound
caccgcaaacccgtt

SEQ ID NO: 29854 - DNA, 15 bp, Artificial Sequence
  Antisense compound
acaccgcaaacccgt

SEQ ID NO: 29855 - DNA, 15 bp, Artificial Sequence
  Antisense compound
tacaccgcaaacccg

SEQ ID NO: 29856 - DNA, 15 bp, Artificial Sequence
  Antisense compound
ttacaccgcaaaccc

SEQ ID NO: 29857 - DNA, 15 bp, Artificial Sequence
  Antisense compound
cttacaccgcaaacc

SEQ ID NO: 29858 - DNA, 15 bp, Artificial Sequence
  Antisense compound
acttacaccgcaaac

SEQ ID NO: 29859 - DNA, 15 bp, Artificial Sequence
  Antisense compound
cacttacaccgcaaa

SEQ ID NO: 29860 - DNA, 15 bp, Artificial Sequence
  Antisense compound
gcacttacaccgcaa

SEQ ID NO: 29861 - DNA, 15 bp, Artificial Sequence
  Antisense compound
tgcacttacaccgca

SEQ ID NO: 29862 - DNA, 15 bp, Artificial Sequence
  Antisense compound
ctgcacttacaccgc

SEQ ID NO: 29863 - DNA, 15 bp, Artificial Sequence
  Antisense compound
gctgcacttacaccg

SEQ ID NO: 29864 - DNA, 15 bp, Artificial Sequence
  Antisense compound
ggctgcacttacacc

SEQ ID NO: 29865 - DNA, 15 bp, Artificial Sequence
  Antisense compound
gggctgcacttacac

SEQ ID NO: 29866 - DNA, 15 bp, Artificial Sequence
  Antisense compound
cgggctgcacttaca

SEQ ID NO: 29867 - DNA, 15 bp, Artificial Sequence
  Antisense compound
acgggctgcacttac

SEQ ID NO: 29868 - DNA, 15 bp, Artificial Sequence
  Antisense compound
gacgggctgcactta

SEQ ID NO: 29869 - DNA, 15 bp, Artificial Sequence
  Antisense compound
agacgggctgcactt

SEQ ID NO: 29870 - DNA, 15 bp, Artificial Sequence
  Antisense compound
aagacgggctgcact

SEQ ID NO: 29871 - DNA, 15 bp, Artificial Sequence
  Antisense compound
taagacgggctgcac

SEQ ID NO: 29872 - DNA, 15 bp, Artificial Sequence
  Antisense compound
gtaagacgggctgca

SEQ ID NO: 29873 - DNA, 15 bp, Artificial Sequence
  Antisense compound
tgtaagacgggctgc

SEQ ID NO: 29874 - DNA, 15 bp, Artificial Sequence
  Antisense compound
gtgtaagacgggctg

SEQ ID NO: 29875 - DNA, 15 bp, Artificial Sequence
  Antisense compound
ggtgtaagacgggct

SEQ ID NO: 29876 - DNA, 15 bp, Artificial Sequence
  Antisense compound
cggtgtaagacgggc

SEQ ID NO: 29877 - DNA, 15 bp, Artificial Sequence
  Antisense compound
acggtgtaagacggg

SEQ ID NO: 29878 - DNA, 15 bp, Artificial Sequence
  Antisense compound
cacggtgtaagacgg

SEQ ID NO: 29879 - DNA, 15 bp, Artificial Sequence
  Antisense compound
gcacggtgtaagacg

SEQ ID NO: 29880 - DNA, 15 bp, Artificial Sequence
  Antisense compound
cgcacggtgtaagac

SEQ ID NO: 29881 - DNA, 15 bp, Artificial Sequence
  Antisense compound
ccgcacggtgtaaga

SEQ ID NO: 29882 - DNA, 15 bp, Artificial Sequence
  Antisense compound
gccgcacggtgtaag

SEQ ID NO: 29883 - DNA, 15 bp, Artificial Sequence
  Antisense compound
tgccgcacggtgtaa

SEQ ID NO: 29884 - DNA, 15 bp, Artificial Sequence
  Antisense compound
gtgccgcacggtgta

SEQ ID NO: 29885 - DNA, 15 bp, Artificial Sequence
  Antisense compound
tgtgccgcacggtgt

SEQ ID NO: 29886 - DNA, 15 bp, Artificial Sequence
  Antisense compound
ctgtgccgcacggtg

SEQ ID NO: 29887 - DNA, 15 bp, Artificial Sequence
  Antisense compound
cctgtgccgcacggt

SEQ ID NO: 29888 - DNA, 15 bp, Artificial Sequence
  Antisense compound
gcctgtgccgcacgg

SEQ ID NO: 29889 - DNA, 15 bp, Artificial Sequence
  Antisense compound
tgcctgtgccgcacg

SEQ ID NO: 29890 - DNA, 15 bp, Artificial Sequence
  Antisense compound
gtgcctgtgccgcac

SEQ ID NO: 29891 - DNA, 15 bp, Artificial Sequence
  Antisense compound
agtgcctgtgccgca

SEQ ID NO: 29892 - DNA, 15 bp, Artificial Sequence
  Antisense compound
tagtgcctgtgccgc

SEQ ID NO: 29893 - DNA, 15 bp, Artificial Sequence
  Antisense compound
ctagtgcctgtgccg

SEQ ID NO: 29894 - DNA, 15 bp, Artificial Sequence
  Antisense compound
actagtgcctgtgcc

SEQ ID NO: 29895 - DNA, 15 bp, Artificial Sequence
  Antisense compound
tactagtgcctgtgc

SEQ ID NO: 29896 - DNA, 15 bp, Artificial Sequence
  Antisense compound
gtactagtgcctgtg

SEQ ID NO: 29897 - DNA, 15 bp, Artificial Sequence
  Antisense compound
agtactagtgcctgt

SEQ ID NO: 29898 - DNA, 15 bp, Artificial Sequence
  Antisense compound
cagtactagtgcctg

SEQ ID NO: 29899 - DNA, 15 bp, Artificial Sequence
  Antisense compound
tcagtactagtgcct

SEQ ID NO: 29900 - DNA, 15 bp, Artificial Sequence
  Antisense compound
atcagtactagtgcc

SEQ ID NO: 29901 - DNA, 15 bp, Artificial Sequence
  Antisense compound
catcagtactagtgc

SEQ ID NO: 29902 - DNA, 15 bp, Artificial Sequence
  Antisense compound
acatcagtactagtg

SEQ ID NO: 29903 - DNA, 15 bp, Artificial Sequence
  Antisense compound
gacatcagtactagt

SEQ ID NO: 29904 - DNA, 15 bp, Artificial Sequence
  Antisense compound
cgacatcagtactag

SEQ ID NO: 29905 - DNA, 15 bp, Artificial Sequence
  Antisense compound
acgacatcagtacta

SEQ ID NO: 29906 - DNA, 15 bp, Artificial Sequence
  Antisense compound
gacgacatcagtact

SEQ ID NO: 29907 - DNA, 15 bp, Artificial Sequence
  Antisense compound
agacgacatcagtac

SEQ ID NO: 29908 - DNA, 15 bp, Artificial Sequence
  Antisense compound
tagacgacatcagta

SEQ ID NO: 29909 - DNA, 15 bp, Artificial Sequence
  Antisense compound
gtagacgacatcagt

SEQ ID NO: 29910 - DNA, 15 bp, Artificial Sequence
  Antisense compound
tgtagacgacatcag

SEQ ID NO: 29911 - DNA, 15 bp, Artificial Sequence
  Antisense compound
ctgtagacgacatca

SEQ ID NO: 29912 - DNA, 15 bp, Artificial Sequence
  Antisense compound
cctgtagacgacatc

SEQ ID NO: 29913 - DNA, 15 bp, Artificial Sequence
  Antisense compound
ccctgtagacgacat

SEQ ID NO: 29914 - DNA, 15 bp, Artificial Sequence
  Antisense compound
gccctgtagacgaca

SEQ ID NO: 29915 - DNA, 15 bp, Artificial Sequence
  Antisense compound
agccctgtagacgac

SEQ ID NO: 29916 - DNA, 15 bp, Artificial Sequence
  Antisense compound
aagccctgtagacga

SEQ ID NO: 29917 - DNA, 15 bp, Artificial Sequence
  Antisense compound
aaagccctgtagacg

SEQ ID NO: 29918 - DNA, 15 bp, Artificial Sequence
  Antisense compound
aaaagccctgtagac

SEQ ID NO: 29919 - DNA, 15 bp, Artificial Sequence
  Antisense compound
caaaagccctgtaga

SEQ ID NO: 29920 - DNA, 15 bp, Artificial Sequence
  Antisense compound
tcaaaagccctgtag

SEQ ID NO: 29921 - DNA, 15 bp, Artificial Sequence
  Antisense compound
atcaaaagccctgta

SEQ ID NO: 29922 - DNA, 15 bp, Artificial Sequence
  Antisense compound
tatcaaaagccctgt

SEQ ID NO: 29923 - DNA, 15 bp, Artificial Sequence
  Antisense compound
atatcaaaagccctg

SEQ ID NO: 29924 - DNA, 15 bp, Artificial Sequence
  Antisense compound
aatatcaaaagccct

SEQ ID NO: 29925 - DNA, 15 bp, Artificial Sequence
  Antisense compound
aaatatcaaaagccc

SEQ ID NO: 29926 - DNA, 15 bp, Artificial Sequence
  Antisense compound
taaatatcaaaagcc

SEQ ID NO: 29927 - DNA, 15 bp, Artificial Sequence
  Antisense compound
gtaaatatcaaaagc

SEQ ID NO: 29928 - DNA, 15 bp, Artificial Sequence
  Antisense compound
tgtaaatatcaaaag

SEQ ID NO: 29929 - DNA, 15 bp, Artificial Sequence
  Antisense compound
ttgtaaatatcaaaa

SEQ ID NO: 29930 - DNA, 15 bp, Artificial Sequence
  Antisense compound
gttgtaaatatcaaa

SEQ ID NO: 29931 - DNA, 15 bp, Artificial Sequence
  Antisense compound
cgttgtaaatatcaa

SEQ ID NO: 29932 - DNA, 15 bp, Artificial Sequence
  Antisense compound
tcgttgtaaatatca

SEQ ID NO: 29933 - DNA, 15 bp, Artificial Sequence
  Antisense compound
ttcgttgtaaatatc

SEQ ID NO: 29934 - DNA, 9 bp, Artificial Sequence
  Antisense compound
agtagggct

SEQ ID NO: 29935 - DNA, 32 bp, Artificial Sequence
  Antisense compound
atgatgttgagctggttgcgaaaataaagggg

SEQ ID NO: 29936 - DNA, 20 bp, Artificial Sequence
  Antisense compound
tgggtaggtaaaaacctaat

SEQ ID NO: 29937 - DNA, 20 bp, Artificial Sequence
  Antisense compound
ctgggtaggtaaaaacctaa

SEQ ID NO: 29938 - DNA, 20 bp, Artificial Sequence
  Antisense compound
cctgggtaggtaaaaaccta

SEQ ID NO: 29939 - DNA, 20 bp, Artificial Sequence
  Antisense compound
tcctgggtaggtaaaaacct

SEQ ID NO: 29940 - DNA, 20 bp, Artificial Sequence
  Antisense compound
ttcctgggtaggtaaaaacc

SEQ ID NO: 29941 - DNA, 20 bp, Artificial Sequence
  Antisense compound
tttcctgggtaggtaaaaac

SEQ ID NO: 29942 - DNA, 20 bp, Artificial Sequence
  Antisense compound
ttttcctgggtaggtaaaaa

SEQ ID NO: 29943 - DNA, 20 bp, Artificial Sequence
  Antisense compound
cttttcctgggtaggtaaaa

SEQ ID NO: 29944 - DNA, 20 bp, Artificial Sequence
  Antisense compound
gcttttcctgggtaggtaaa

SEQ ID NO: 29945 - DNA, 20 bp, Artificial Sequence
  Antisense compound
ggcttttcctgggtaggtaa

SEQ ID NO: 29946 - DNA, 20 bp, Artificial Sequence
  Antisense compound
tggcttttcctgggtaggta

SEQ ID NO: 29947 - DNA, 20 bp, Artificial Sequence
  Antisense compound
ttggcttttcctgggtaggt

SEQ ID NO: 29948 - DNA, 20 bp, Artificial Sequence
  Antisense compound
gttggcttttcctgggtagg

SEQ ID NO: 29949 - DNA, 15 bp, Artificial Sequence
  Antisense compound
tgtagacgacatcag

SEQ ID NO: 29950 - DNA, 15 bp, Artificial Sequence
  Antisense compound
ccctgtagacgacat

SEQ ID NO: 29951 - DNA, 21 bp, Artificial Sequence
  misc_feature (1)...(19): oligonucleotide duplex; bases at designated positions are in ribonucleotides
ugaugaucgacugcaacacgg

SEQ ID NO: 29952 - DNA, 21 bp, Artificial Sequence
  misc_feature (1)...(19): oligonucleotide duplex; bases at designated positions are in ribonucleotides.
guguugcagucgaucaucagc

SEQ ID NO: 29953 - DNA, 21 bp, Artificial Sequence
  misc_feature (1)...(19): oligonucleotide duplex; bases at designated positions are in ribonucleotides.
gaacuucccaaacaguauctt

SEQ ID NO: 29954 - DNA, 21 bp, Artificial Sequence
  misc_feature (1)...(19): oligonucleotide duplex; bases at designated positions are in ribonucleotides.
gauacuguuugggaaguucaa

SEQ ID NO: 29955 - DNA, 21 bp, Artificial Sequence
  misc_feature (1)...(19): oligonucleotide duplex; bases at designated positions are in ribonucleotides.
aauguaccuugcuguaauuta

SEQ ID NO: 29956 - DNA, 21 bp, Artificial Sequence
  misc_feature (1)...(19): oligonucleotide duplex; bases at designated positions are in ribonucleotides.
aauuacagcaagguacauuct

SEQ ID NO: 29957 - DNA, 21 bp, Artificial Sequence
  misc_feature (1)...(19): oligonucleotide duplex; bases at designated positions are in ribonucleotides.
guagcaacaagugccuuaagt

SEQ ID NO: 29958 - DNA, 21 bp, Artificial Sequence
  misc_feature (1)...(19): oligonucleotide duplex; bases at designated positions are in ribonucleotides.
uuaaggcacuuguugcuacag

SEQ ID NO: 29959 - DNA, 21 bp, Artificial Sequence
  misc_feature (1)...(19): oligonucleotide duplex; bases at designated positions are in ribonucleotides.
uaccauucugcagcagcuctt

SEQ ID NO: 29960 - DNA, 21 bp, Artificial Sequence
  misc_feature (1)...(19): oligonucleotide duplex; bases at designated positions are in ribonucleotides.
gagcugcugcagaaugguatg

SEQ ID NO: 29961 - DNA, 21 bp, Artificial Sequence
  misc_feature (1)...(19): oligonucleotide duplex; bases at designated positions are in ribonucleotides.
uaaccaaguuauaaauaguct

SEQ ID NO: 29962 - DNA, 21 bp, Artificial Sequence
  misc_feature (1)...(19): oligonucleotide duplex; bases at designated positions are in ribonucleotides.
acuauuuauaacuugguuaaa

SEQ ID NO: 29963 - DNA, 21 bp, Artificial Sequence
  misc_feature (1)...(19): oligonucleotide duplex; bases at designated positions are in ribonucleotides.
ggcaauccuaagauuuuugaa

SEQ ID NO: 29964 - DNA, 21 bp, Artificial Sequence
  misc_feature (1)...(19): oligonucleotide duplex; bases at designated positions are in ribonucleotides.
caaaaaucuuaggauugccta

SEQ ID NO: 29965 - DNA, 21 bp, Artificial Sequence
  misc_feature (1)...(19): oligonucleotide duplex; bases at designated positions are in ribonucleotides.
uugauucuccuuaagagacat

SEQ ID NO: 29966 - DNA, 21 bp, Artificial Sequence
  misc_feature (1)...(19): oligonucleotide duplex; bases at designated positions are in ribonucleotides.
gucucuuaaggagaaucaaat

SEQ ID NO: 29967 - DNA, 21 bp, Artificial Sequence
  misc_feature (1)...(19): oligonucleotide duplex; bases at designated positions are in ribonucleotides.
ucuguaguaauuuguguagac

SEQ ID NO: 29968 - DNA, 21 bp, Artificial Sequence
  misc_feature (1)...(19): oligonucleotide duplex; bases at designated positions are in ribonucleotides
cuacacaaauuacuacagaca

SEQ ID NO: 29969 - DNA, 21 bp, Artificial Sequence
  misc_feature (1)...(19): oligonucleotide duplex; bases at designated positions are in ribonucleotides.
aaagccaagcagugcuauaag

SEQ ID NO: 29970 - DNA, 21 bp, Artificial Sequence
  misc_feature (1)...(19): oligonucleotide duplex; bases at designated positions are in ribonucleotides.
uauagcacugcuuggcuuugt

SEQ ID NO: 29971 - DNA, 20 bp, Artificial Sequence
  Antisense compound
gtgttgcagtcgatcatcag

SEQ ID NO: 29972 - DNA, 20 bp, Artificial Sequence
  Antisense compound
attgttgagtcctgcggtaa

SEQ ID NO: 29973 - DNA, 20 bp, Artificial Sequence
  Antisense compound
gatactgtttgggaagttca

SEQ ID NO: 29974 - DNA, 20 bp, Artificial Sequence
  Antisense compound
gaagcacctaatgctaagga

SEQ ID NO: 29975 - DNA, 20 bp, Artificial Sequence
  Antisense compound
aattacagcaaggtacattc

SEQ ID NO: 29976 - DNA, 20 bp, Artificial Sequence
  Antisense compound
cgttagagaattgtatctta

SEQ ID NO: 29977 - DNA, 20 bp, Artificial Sequence
  Antisense compound
ttaaggcacttgttgctaca

SEQ ID NO: 29978 - DNA, 20 bp, Artificial Sequence
  Antisense compound
tagacatggtacatgcgaaa

SEQ ID NO: 29979 - DNA, 20 bp, Artificial Sequence
  Antisense compound
gagctgctgcagaatggtat

SEQ ID NO: 29980 - DNA, 20 bp, Artificial Sequence
  Antisense compound
taactagtgctatgcaaaca

SEQ ID NO: 29981 - DNA, 20 bp, Artificial Sequence
  Antisense compound
actatttataacttggttaa

SEQ ID NO: 29982 - DNA, 20 bp, Artificial Sequence
  Antisense compound
aacaaggagatgattacgtg

SEQ ID NO: 29983 - DNA, 20 bp, Artificial Sequence
  Antisense compound
caaaaatcttaggattgcct

SEQ ID NO: 29984 - DNA, 20 bp, Artificial Sequence
  Antisense compound
ataagtttccagttcttcat

SEQ ID NO: 29985 - DNA, 20 bp, Artificial Sequence
  Antisense compound
gtctcttaaggagaatcaaa

SEQ ID NO: 29986 - DNA, 20 bp, Artificial Sequence
  Antisense compound
tcacaaatattacctgaccc

SEQ ID NO: 29987 - DNA, 20 bp, Artificial Sequence
  Antisense compound
ctacacaaattactacagac

SEQ ID NO: 29988 - DNA, 20 bp, Artificial Sequence
  Antisense compound
tgctatttggaatcttgacg

SEQ ID NO: 29989 - DNA, 20 bp, Artificial Sequence
  Antisense compound
tatagcactgcttggctttg

SEQ ID NO: 29990 - DNA, 20 bp, Artificial Sequence
  Antisense compound
taatctcacatagcaatctt

SEQ ID NO: 29991 - DNA, 20 bp, Artificial Sequence
  Antisense compound
tctctaaacgaactttaaaa

SEQ ID NO: 29992 - DNA, 20 bp, Artificial Sequence
  Antisense compound
caactaaacgaacatgttta

SEQ ID NO: 29993 - DNA, 20 bp, Artificial Sequence
  Antisense compound
cacataaacgaacttatgga

SEQ ID NO: 29994 - DNA, 20 bp, Artificial Sequence
  Antisense compound
agtgagtacgaacttatgta

SEQ ID NO: 29995 - DNA, 20 bp, Artificial Sequence
  Antisense compound
ggtctaaacgaactaactat

SEQ ID NO: 29996 - DNA, 20 bp, Artificial Sequence
  Antisense compound
ctacatcacgaacgctttct

SEQ ID NO: 29997 - DNA, 20 bp, Artificial Sequence
  Antisense compound
ccataaaacgaacatgaaaa

SEQ ID NO: 29998 - DNA, 20 bp, Artificial Sequence
  Antisense compound
agtctaaacgaacatgaaac

SEQ ID NO: 29999 - DNA, 20 bp, Artificial Sequence
  Antisense compound
taaataaacgaacaaattaa

SEQ ID NO: 30000 - DNA, 20 bp, Artificial Sequence
  Antisense compound
ctacccaggaaaagccaacc

SEQ ID NO: 30001 - DNA, 20 bp, Artificial Sequence
  Antisense compound
tacccaggaaaagccaacca

SEQ ID NO: 30002 - DNA, 20 bp, Artificial Sequence
  Antisense compound
atattaggtttttacctacc

SEQ ID NO: 30003 - DNA, 20 bp, Artificial Sequence
  Antisense compound
cccctttattttcgcaacca

SEQ ID NO: 30004 - DNA, 32 bp, Artificial Sequence
  Antisense compound
cccctttattttcgcaaccagctcaacatcat

SEQ ID NO: 30005 - DNA, 20 bp, Artificial Sequence
  Antisense compound
tctctaaacgaactttaaaa

SEQ ID NO: 30006 - DNA, 20 bp, Artificial Sequence
  Antisense compound
caactaaacgaacatgttta

SEQ ID NO: 30007 - DNA, 20 bp, Artificial Sequence
  Antisense compound
cacataaacgaacttatgga

SEQ ID NO: 30008 - DNA, 20 bp, Artificial Sequence
  Antisense compound
agtgagtacgaacttatgta

SEQ ID NO: 30009 - DNA, 20 bp, Artificial Sequence
  Antisense compound
ggtctaaacgaactaactat

SEQ ID NO: 30010 - DNA, 20 bp, Artificial Sequence
  Antisense compound
ctacatcacgaacgctttct

SEQ ID NO: 30011 - DNA, 20 bp, Artificial Sequence
  Antisense compound
ccataaaacgaacatgaaaa

SEQ ID NO: 30012 - DNA, 20 bp, Artificial Sequence
  Antisense compound
agtctaaacgaacatgaaac

SEQ ID NO: 30013 - DNA, 20 bp, Artificial Sequence
  Antisense compound
taaataaacgaacaaattaa

SEQ ID NO: 30014 - DNA, 72 bp, Artificial Sequence
  Antisense compound
atattaggtttttacctacccaggaaaagccaaccaacctcgatctcttgtagatctgttctctaaacgaac

SEQ ID NO: 30015 - DNA, 20 bp, Artificial Sequence
  Antisense compound
gtgcgcgcgagcccgaaatc

SEQ ID NO: 30016 - DNA, 20 bp, Artificial Sequence
  Antisense compound
tcgatctccttttatgcccg

SEQ ID NO: 30017 - DNA, 20 bp, Artificial Sequence
  Antisense compound
ctcttactgtgctgtggaca

SEQ ID NO: 30018 - DNA, 20 bp, Artificial Sequence
  Antisense compound
tacgtccggaggcgtacgcc

SEQ ID NO: 30019 - DNA, 20 bp, Artificial Sequence
  Antisense compound
tattccacgaacgtaggctg

SEQ ID NO: 30020 - DNA, 20 bp, Artificial Sequence
  Antisense compound
cgttattaacctccgttgaa

SEQ ID NO: 30021 - DNA, 20 bp, Artificial Sequence
  Antisense compound
acaagcgtcaaccgtattat

SEQ ID NO: 30022 - DNA, 20 bp, Artificial Sequence
  Antisense compound
ttcgcggctggacgattcag

SEQ ID NO: 30023 - DNA, 20 bp, Artificial Sequence
  Antisense compound
gaggtctcgacttacccgct

SEQ ID NO: 30024 - DNA, 20 bp, Artificial Sequence
  Antisense compound
ttagaatacgtcgcgttatg

SEQ ID NO: 30025 - DNA, 20 bp, Artificial Sequence
  Antisense compound
atgcatactacgaaaggccg

SEQ ID NO: 30026 - DNA, 20 bp, Artificial Sequence
  Antisense compound
gtacagttatgcgcggtaga

SEQ ID NO: 30027 - DNA, 20 bp, Artificial Sequence
  Antisense compound
ttctacctcgcgcgatttac

SEQ ID NO: 30028 - DNA, 20 bp, Artificial Sequence
  Antisense compound
attcgccagacaacactgac

SEQ ID NO: 30029 - DNA, 20 bp, Artificial Sequence
  Antisense compound
tagtgcggacctacccacga

SEQ ID NO: 30030 - DNA, 20 bp, Artificial Sequence
  Antisense compound
ccttccctgaaggttcctcc

SEQ ID NO: 30031 - DNA, 20 bp, Artificial Sequence
  Antisense compound
ccttccctgaaggttcctcc

SEQ ID NO: 30032 - DNA, 20 bp, Artificial Sequence
  Antisense compound
gtgcgcgcgagcccgaaatc

SEQ ID NO: 30033 - DNA, 20 bp, Artificial Sequence
  Antisense compound
tagtgcggacctacccacga

SEQ ID NO: 30034 - DNA, 20 bp, Artificial Sequence
  Antisense compound
ccttccctgaaggttcctcc

SEQ ID NO: 30035 - DNA, 20 bp, Artificial Sequence
  Antisense compound
ctgctagcctctggatttga

SEQ ID NO: 30036 - DNA, 20 bp, Artificial Sequence
  Antisense compound
ctaagcgctcaatgaacatg

SEQ ID NO: 30037 - DNA, 20 bp, Artificial Sequence
  Antisense compound
ttgtcaccttgtgctccaca

SEQ ID NO: 30038 - DNA, 21 bp, Artificial Sequence
  misc_feature (1)...(19): bases at these positions are RNA
ctgctagcctctggatttgtt

SEQ ID NO: 30039 - DNA, 21 bp, Artificial Sequence
  misc_feature (1)...(19): bases at these positions are RNA
caaatccagaggctagcagtt

SEQ ID NO: 30040 - DNA, 21 bp, Artificial Sequence
  siRNA Antisense
tgtcaccttgtgctccacatc

SEQ ID NO: 30041 - DNA, 21 bp, Artificial Sequence
  siRNA Complement
tgtggagcacaaggtgacaac

SEQ ID NO: 30042 - DNA, 26 bp, Artificial Sequence
  PCR Primer
aatggctaagtgaagatgacaatcat

SEQ ID NO: 30043 - DNA, 25 bp, Artificial Sequence
  PCR Primer
tgcacatatcattacaccagttcgt

SEQ ID NO: 30044 - DNA, 30 bp, Artificial Sequence
  PCR Probe
ttgcagcaattcactgtaaagctggaaagg

SEQ ID NO: 30045 - DNA, 20 bp, Artificial Sequence
  PCR Primer
tgcatttcgctacccgagtt

SEQ ID NO: 30046 - DNA, 23 bp, Artificial Sequence
  PCR Primer
catcaacatcaggcacttctcag

SEQ ID NO: 30047 - DNA, 30 bp, Artificial Sequence
  PCR Probe
cagtgcagattccacgttcttgttccgata

SEQ ID NO: 30048 - DNA, 20 bp, Artificial Sequence
  Antisense compound
ataaattatttctgtggctg

SEQ ID NO: 30049 - DNA, 20 bp, Artificial Sequence
  Antisense compound
ttgagcttcttgctgtggat

SEQ ID NO: 30050 - DNA, 20 bp, Artificial Sequence
  Antisense compound
catgatgtcccgcacggtgg

SEQ ID NO: 30051 - DNA, 20 bp, Artificial Sequence
  Antisense compound
aatagcccgtcacattgagg

SEQ ID NO: 30052 - DNA, 20 bp, Artificial Sequence
  Antisense compound
acccacttgatgttggcttt

SEQ ID NO: 30053 - DNA, 20 bp, Artificial Sequence
  Antisense compound
gctgttttctgtgaaccact

SEQ ID NO: 30054 - DNA, 21 bp, Artificial Sequence
  Antisense compound
gcgtttgctcttcttcttgcg

SEQ ID NO: 30055 - DNA, 28586 bp, transmissible gastroenteritis virus
  misc_structure (12332)...(12414): Frameshift Site
  misc_structure (12345)...(12414): Pseudoknot
  misc_structure (12332)...(12338): Slippery Site
  misc_structure (12345)...(12354): Stem 1 up
  misc_structure (12358)...(12362): Stem 2 down
  misc_structure (12365)...(12374): Stem 1 down
  misc_structure (12405)...(12409): Stem 2 up
acttttaaagtaaagtgagtgtagcgtggctatatctcttcttttactttaactagccttgtgctagattttgtcttcggacaccaactcgaactaaacgaaatatttgtctttctatgaaatcatagaggacaagcgttgattatttccattcagtttggcaatcactccttggaacggggttgagcgaacggtgcagtagggttccgtccctatttcgtaagtcgcctagtagtagcgagtgcggttccgcccgtacaacgttgggtagaccgggttccgtcctgtgatctccctcgccggccgccaggagaatgagttccaaacaattcaagatccttgttaatgaggactatcaagtcaacgtgcctagtcttcctattcgtgacgtgttacaggaaattaagtactgctaccgtaatggatttgagggctatgttttcgtaccagaatactgtcgtgacctagttgattgcgatcgtaaggatcactacgtcattggtgttcttggtaacggagtaagtgatcttaaacctgttcttcttaccgaaccctccgtcatgttgcaaggctttattgttagagctaactgcaatggcgttcttgaggactttgaccttaaaattgctcgcactggcagaggtgccatatatgttgatcaatacatgtgtggtgctgatggaaaaccagtcattgaaggcgattttaaggactacttcggtgatgaagacatcattgaatttgaaggagaggagtaccattgcgcttggacaactgtgcgcgatgagaaaccgctgaatcagcaaactctctttaccattcaggaaatccaatacaatctggacattcctcataaattgccaaactgtgctactagacatgtagcaccaccagtcaaaaagaactctaaaatagttctgtctgaagattacaagaagctttatgatatcttcggatcaccctttatgggaaatggtgactgtcttagcaaatgctttgacactcttcattttatcgctgctactcttagatgcccgtgtggttctgaaagtagcggcgttggagattggactggttttaagactgcctgttgtggtctttctggcaaagttaagggtgtcactttgggtgatattaagcctggtgatgctgttgtcactagtatgagcgcaggtaagggagttaagttctttgccaattgtgttcttcaatatgctggtgatgttgaaggtgtctccatctggaaagttattaaaacttttacagttgatgagactgtatgcacccctggttttgaaggcgaattgaacgacttcatcaaacctgagagcaaatcactagttgcatgcagcgttaaaagagcattcattactggtgatattgatgatgctgtacatgattgtatcattacaggaaaattggatcttagtaccaacctttttggtaatgttggtctattattcaagaagactccatggtttgtacaaaagtgtggtgcactttttgtagacgcttggaaagtagtagaggagctttgtggttcactcacacttacatacaagcaaatttatgaagttgtagcatcactttgcacttctgcttttacgattgtaaactacaagccaacatttgtggttccagacaatcgtgttaaagatcttgtagacaagtgtgtgaaagttcttgtaaaagcatttgatgtttttacgcagattatcacaatagctggtattgaggccaaatgctttgtgcttggtgctaaatacctgttgttcaataatgcacttgtcaaacttgtcagtgttaaaatccttggcaagaagcaaaagggtcttgaatgtgcattctttgctactagcttggttggtgcaactgttaatgtgacacctaaaagaacagagactgccactatcagcttgaacaaggttgatgatgttgtagcaccaggagagggttatatcgtcattgttggtgatatggctttctacaagagtggtgaatattatttcatgatgtctagtcctaattttgttcttactaacaatgtttttaaagcagttaaagttccatcttatgacatcgtttatgatgttgataatgataccaaaagcaaaatgattgcaaaacttggttcatcatttgaatatgatggtgatattgatgctgctattgtaaaagtcaatgaactactcattgaatttaggcagcaaagcttgtgcttcagagcttttaaggacgacaaaagcatttttgttgaagcctattttaaaaagtataaaatgccagcatgccttgcaaaacatattggtttgtggaacatcataaagaaagattcatgtaagaggggttttcttaatctcttcaatcacttgaatgaattggaagatatcaaagaaactaatattcaggctattaaaaacattctttgccctgatcctcttcttgatctggattatggtgccatttggtacaattgcatgccaggttgctctgatccttcagttttggggagtgttcaacttttgatcggtaatggtgtgaaagtagtttgtgatggctgcaaaggttttgctaaccaactttcaaaaggttacaacaagctctgtaatgcggctcgcaatgatattgagatcggtggtataccattttccacttttaaaacacctacaaatacttttattgaaatgacagatgctatctattcagttattgaacaaggtaaggcattatcctttagagatgctgatgtgccagttgtagacaatggtaccatttctactgctgattggtctgaacccattctgcttgaacctgctgaatatgtaaaaccaaagaacaatggtaatgtcattgttattgcaggttatacattttataaagatgaggatgaacatttttatccttatggttttggtaaaattgtgcagagaatgtataataaaatgggtggtggtgacaaaactgtctcattttcagaagaagtagatgttcaagaaattgcacctgttacacgtgttaaacttgaattcgaatttgacaatgaaattgtaactggtgttcttgaacgggctattggtactagatacaaatttactggtacaacttgggaagaatttgaagagtctatttctgaagaactcgatgcaatctttgatactctagcaaaccaaggtgtcgaacttgaaggttacttcatttatgacacttgtggtggctttgatataaaaaatccagatggtattatgatctctcagtatgatatcaatattactgctgatgaaaaatcagaagttagtgcatcaagtgaagaagaagaagttgaatctgttgaagaagatcctgagaatgaaattgtagaagcatctgaaggtgctgaagggacttcttctcaagaagaggttgaaacagtagaagttgcagatattacttctacagaagaagatgttgacattgttgaagtatctgctaaagatgacccttgggctgcagctgttgatgtacaagaagctgaacaatttaatccttctctaccacctttcaagacaacgaatctcaacggaaaaattatccttaagcaaggggataataattgttggataaatgcttgttgctatcagcttcaggcctttgattttttcaacaatgaagcttgggagaaatttaagaaaggtgatgtcatggactttgtaaacctttgttatgcagcaacaacactagcaagaggtcattctggtgatgcagagtatcttcttgaacttatgctcaatgattatagcacagccaagatagtacttgcagctaagtgtggttgtggtgaaaaagaaattgttttggaaagagctgtttttaaactcaccccacttaaggagagttttaattatggtgtttgtggtgactgcatgcaagttaacacctgtagatttttaagtgttgaaggctctggtgtttttgttcatgacatattaagcaagcaaacgccagaagctatgtttgttgtcaaacctgttatgcatgcagtttacactggcacaactcaaaatggccattacatggttgatgatattgaacacggttattgtgtagatggtatgggtattaaaccacttaagaaacggtgttatacatccacattgttcattaatgccaatgtaatgactagagctgaaaaaccaaaacaagagtttaaagttgaaaaagtagaacagcaaccgatagtggaggaaaacaaatcctctattgaaaaagaggaaattcaaagtcctaaaaacgatgaccttatacttccattttacaaagctggtaaactttccttttatcagggtgctttggatgttttgatcaatttcttggaacctgatgttattgttaatgctgctaatggtgatcttaaacacatgggtggtgtcgcaagagccatcgatgttttcactggtggcaaattaacagaacgttctaaggattatcttaaaaagaacaaatctattgctcctggtaatgctgttttctttgaaaatgtcattgagcatcttagtgttttgaatgcagttggaccacgtaatggtgacagccgagttgaagccaaactttgtaatgtttacaaagcaattgcaaagtgtgaaggaaaaatattaacaccacttattagtgttggtatctttaatgttagacttgaaacatcattgcagtgcttacttaagactgtgaatgacaggggattgaatgtcttcgtatacactgaccaggagaggcaaactattgagaatttcttctcttgttctatccctgtcaatgttactgaggataatgttaaccatgaacgtgtgtctgtttcttttgacaaaacatacggtgaacagcttaagggcaccgttgtcatcaaagacaaagatgttacaaaccagttgcctagcgcttttgatgttggtcaaaaagttattaaggctattgatatagattggcaagctcattatggtttccgtgatgctgctgcttttagcgctagtagtcatgatgcttataaatttgaagttgttacacatagcaatttcattgtgcataagcagactgacaacaactgttggattaatgcaatttgtcttgcattacagagactcaagccacagtggaaatttcctggtgttagaggtctctggaatgaatttcttgagcgtaaaacacaaggttttgtacatatgttgtatcacatttctggagtaaagaaaggtgagccaggtgatgctgaattaatgctgcataaacttggtgacttgatggacaatgattgtgaaatcattgtcacacacactacagcatgtgacaagtgcgcaaaagtagaaaagtttgttggaccagtggtagcagcacctcttgcaattcatggcactgacgaaacatgtgtgcatggcgttagtgtcaatgtcaaagtcacccaaattaagggcactgttgctattacttctttgattggtcctattattggagaagtactagaagcaactggttatatttgttatagcggttctaacaggaatggtcattacacctattacgataaccgtaatggattagtggttgatgcagaaaaggcttaccattttaatagagacttattacaggtcacaacagctattgcaagtaatttcgttgtcaagaaaccacaagcagaggaaagacctaagaattgtgcttttaacaaagttgcagcatctcctaagattgtacaagaacaaaaattgttggctattgaaagtggtgctaactatgctcttactgaatttggaagatatgctgacatgttctttatggctggagataaaattcttaggttgctgcttgaagtctttaaatatttgctggttttatttatgtgtcttagaagtactaagatgcctaaagttaaagtcaaaccacctcttgcatttaaagattttggtgctaaggtcagaacgctcaattacatgagacaattgaacaaaccctctgtctggcgttacgcaaaactagttttattgttgatagcaatatataatttcttttatttgtttgtcagtataccagtagtgcataaattaacatgtaacggtgctgtacaggcatataaaaattctagttttataaagtctgcagtctgtggcaactctattttatgcaaagcctgtttggcttcttatgatgagttggctgattttcaacatctccaagttacttgggatttcaaatctgacccactatggaacagactggtacaattgtcttactttgcattcttggctgtttttggtaataactatgttaggtgttttcttatgtattttgtatctcagtacctcaacctttggctttcttattttggttatgtagagtacagttggtttttgcatgttgtcaactttgaatccatctcagctgagtttgtgatcgtagttatagtggttaaggcagttctcgcccttaaacatattgttttcgcatgctcaaacccgtcttgcaaaacgtgctctaggactgcaaggcagacacgtattcctattcaagttgttgttaatggttcaatgaagactgtttatgttcatgctaatggtactggtaaattctgcaagaaacacaatttttattgtaagaactgtgattcttatggctttgaaaacacattcatctgtgacgaaattgtacgtgatctcagtaatagtgttaaacaaactgtttacgccactgatagatctcatcaagaagtcacaaaagttgaatgttcagatggcttttacagattttatgttggtgatgaattcacttcatatgactatgatgtaaaacacaagaaatacagtagtcaagaggttctcaagagcatgctcttgcttgatgacttcattgtgtacagtccatctggttctgctcttgcaaatgttagaaatgcctgtgtttacttttcacaacttattggtaagcctattaagattgttaacagtgatttgcttgaagacctctctgtagattttaaaggggcactttttaatgctaaaaagaatgtaattaagaattctttcaatgttgatgtctcagaatgcaaaaatcttgacgaatgttacagggcttgcaatcttaatgtttcattttctacatttgaaatggctgtcaacaatgctcataggtttggtattctgattactgatcgttcttttaacaatttctggccatcaaaagttaagcctggttcatctggtgtgtcggccatggacattggtaagtgtatgacttctgatgctaagattgttaatgctaaagttttaactcaacgtggtaaaagtgttgtttggcttagccaggattttgctgcacttagctcaactgctcagaaagttttggttaaaacttttgtagaagaaggtgtcaacttttcactcacatttaatgctgtaggttcagatgatgatcttccttatgaaagattcactgaatctgtgtctccaaaaagtggttcaggctttttcgatgtaattacacagcttaaacaaattgtgattttggtttttgtttttatctttatttgtggtttgtgctctgtttacagtgttgctacacagtcctacattgaatctgctgaaggctatgactacatggttattaagaatggaattgttcaaccttttgacgataccatttcatgtgttcataacacttataaaggattcggtgactggtttaaagctaagtatggttttatccctacttttggtaaatcatgtccaattgttgtaggaactgtttttgatcttgaaaatatgagaccaattcctgacgtgcctgcatatgtttctattgtgggtagatctcttgttttcgctattaatgctgcttttggtgttactaatatgtgctatgatcatactggcaatgcagttagtaaggactcttactttgatacttgtgtgtttaatactgcgtgcaccactcttacaggtcttggtggtacaattgtatattgtgcaaagcaaggtttagttgaaggtgctaagctctatagtgatcttatgccagactattattatgagcatgctagtggtaacatggttaaattgccagcaattattagaggacttggtctacgttttgtgaaaacacaggctacaacttattgtagagtgggagagtgcattgatagtaaagctggtttttgctttggtggcgataactggtttgtctacgacaatgagtttggcaatggatacatctgtggtaattctgtgctaggattctttaagaatgtcttcaaactctttaactctaacatgtctgtggtagctacatctggtgcgatgcttgttaacattattattgcatgcttagctattgcaatgtgttatggtgttcttaagtttaagaagatttttggtgattgtactttcctcattgttatgatcattgtcacccttgttgtgaacaatgtgtcttattttgtcactcaaaacacgttctttatgatcatctacgccattgtttactattttataacaagaaaacttgcatacccaggcattcttgatgctgggtttattattgcttatattaatatggctccatggtacgtgattaccgcatatatcctagttttcctctatgactcactcccttcactgtttaaacttaaagtttcaacaaatctttttgaaggtgataaatttgtgggtaactttgaatctgctgctatgggtacttttgttattgacatgcgttcatatgaaactattgttaattctacttctattgctagaattaaatcatatgctaacagcttcaataaatataagtactacacaggttcaatgggagaagctgactacagaatggcttgctatgctcatcttggtaaagctcttatggactattctgttaatagaacagacatgctttacacacctcctactgttagtgttaattctacacttcagtcaggtttgcggaaaatggcacagcctagtggtcttgtagagccttgcattgtaagagtttcctatggtaacaatgtgcttaatggtttatggttaggagatgaagtcatttgccctagacatgttattgctagtgataccacacgtgttatcaactatgaaaatgaaatgtctagtgtgagacttcacaacttttcagtttctaagaataatgtgtttttgggtgttgtgtctgccagatataagggtgtgaatcttgtacttaaagtcaaccaggttaatcctaacacaccagaacataaatttaagtctattaaagctggtgaaagttttaacattcttgcttgttatgaaggatgtcctggcagtgtttatggtgtcaacatgagaagtcaaggtaccattaaaggatcttttatagctggtacttgtggatcagtaggttatgtgttagaaaatggaattctctattttgtatacatgcatcacttagaacttggaaatggctcgcatgttggttccaattttgaaggagaaatgtacggtggttatgaagatcaacctagcatgcaattggaaggtactaatgtcatgtcatcagataatgtggttgcattcctatatgctgcacttatcaatggtgaaaggtggtttgttacaaacacatcgatgtcattagaatcatacaatacatgggccaaaactaacagtttcacagaactttcttcaactgatgcttttagcatgttggctgcaaaaactggtcaaagtgttgagaaattactagatagcatcgtaagactcaacaagggttttggaggtcgtactatactttcttatggctcattgtgtgacgagttcactccaactgaagtcataaggcaaatgtatggtgtaaatcttcaggctggtaaagtaaaatctttcttctaccctattatgactgcaatgacaattctctttgccttttggcttgaattctttatgtacacacccttcacttggattaatccaacttttgttagcattgtattggctgttacaactttgatctcgacggtttttgtctctggcatcaaacataagatgttgttctttatgtcttttgtccttcctagtgttatccttgtgacagcacacaatttgttctgggacttttcttactatgaaagtcttcagtcaattgttgagaatactaacactatgtttttgcctgttgacatgcaaggtgtcatgctcacagtgttttgctttattgtctttgttacatatagtgttagattcttcacttgcaaacaatcatggttctcacttgctgtgacaactattcttgtgatctttaacatggttaaaatctttggaacatctgatgaaccatggactgaaaaccaaattgctttctgctttgtgaacatgcttactatgattgtcagtcttactacaaaggattggatggttgtcattgcatcatacagaattgcatattatattgttgtatgtgtaatgccatctgcttttgtatctgactttgggtttatgaagtgtattagcattgtttacatggcgtgcggttatttgttttgttgctattatggcattctttattgggttaacagatttacatgcatgacttgtggtgtttatcaattcactgtgtctgcagctgaacttaaatacatgaccgctaacaacctttctgcacctaagaacgcatatgacgctatgattcttagtgctaaattgattggtgttggaggtaagagaaacatcaaaatttcaactgtacagtcaaaacttacagagatgaaatgtaccaatgttgtcttgcttggtcttttatctaaaatgcatgtcgagtctaactcaaaagagtggaactattgtgttggactacacaatgagataaacctttgtgacgatcctgaaatcgttcttgagaaactgttagctcttattgcattcttcttgtccaaacataacacttgtgaccttagcgaacttattgaatcatactttgagaacaccaccatactccagagtgtggcttcagcttatgctgcattgcctagctggattgcacttgaaaaagctcgcgctgatcttgaagaggctaagaaaaatgatgttagccctcaaattttgaagcagcttactaaagcatttaacattgccaagagtgattttgagcgcgaagcatcagtgcaaaagaaactcgacaaaatggctgagcaggctgcagctagtatgtataaagaagcacgagctgtggacagaaagtcaaagattgtttctgctatgcatagcctactttttggtatgcttaagaaacttgatatgtccagtgtcaacactattattgaccaggctcgtaatggtgttctacctttaagtatcattccagctgcatcagctacaagacttgttgttattacacctagccttgaagtgttttccaagattaggcaagaaaacaatgttcattatgctggtgctatttggactattgttgaagttaaagatgctaatggttcacatgtacatcttaaggaagtcaccgctgctaatgaattaaaccttacttggccattgagcattacttgtgagagaaccacaaagcttcagaacaatgaaattatgccaggtaaacttaaagaaagagctgtcagagcgtcagcaactcttgatggtgaagctttcggcagtggaaaggctcttatggcatctgaaagtggaaaaagctttatgtatgcatttatagcctcagacaacaatcttaagtatgttaagtgggagagcaataatgatattatacctattgaacttgaagctccattgcgtttctatgttgacggcgctaatggtcctgaagtcaagtatttgtattttgtcaagaatttaaacactcttagacgtggtgccgttcttggttatatcggtgcaacagttcgtctgcaagctggtaaacccactgaacatccatctaacagtagtttattgacattgtgtgctttttcacctgatcctgctaaagcatatgttgatgctgttaagagaggcatgcaaccagttaataactgtgtaaaaatgctctcaaatggtgctggtaatggtatggctgttacaaacggtgtcgaagctaacacacaacaggactcttatggtggtgcttcagtttgtatttattgcagatgccatgttgaacatcctgctattgatggattatgccgctacaaaggtaagttcgtgcaaataccaactggcacacaagatccaattcggttctgtattgaaaatgaagtttgtgttgtctgtggttgttggcttaacaatggttgcatgtgcgatcgtacttctatgcagagttttactgttgatcaaagttatttaaacgagtgcggggttctagtgcagctcgactagaaccctgcaatggtactgatccagaccatgttagtagagcttttgacatctacaacaaagatgttgcgtgtattggtaaattccttaagacgaattgttcaagatttaggaatttggacaaacatgatgcctactacattgtcaaacgttgtacaaagaccgttatggaccatgagcaagtctgttataacgatcttaaagattctggtgctgttgctgagcatgacttcttcacatataaagagggtagatgtgagttcggtaatgttgcacgtaggaatcttacaaagtacacaatgatggatctttgttacgctatcagaaattttgatgaaaagaactgtgaagttctcaaagaaatactcgtgacagtaggtgcttgcactgaagaattctttgaaaataaagattggtttgatccagttgaaaatgaagccatacatgaagtttatgcaaaacttggacccattgtagccaatgctatgcttaaatgtgttgctttttgcgatgcgatagtggaaaaaggctatataggtgttataacacttgacaaccaagatcttaatggcaatttctacgatttcggcgatttcgtgaagactgctccgggttttggttgcgcttgtgttacatcatattattcttatatgatgcctttaatggggatgacttcatgcttagagtctgaaaactttgtgaaaagtgacatctatggttctgattataagcagtatgatttactagcttatgattttaccgaacataaggagtaccttttccaaaaatactttaagtactgggatcgcacatatcacccaaattgttctgattgtactagtgacgagtgtattattcattgtgctaattttaacacattgttttctatgacaataccaatgacagcttttggaccacttgtccgtaaagttcatattgatggtgtaccagtagttgttactgcaggttaccatttcaaacaacttggtatagtatggaatcttgatgtaaaattagacacaatgaagttgagcatgactgatcttcttagatttgtcacagatccaacacttcttgtagcatcaagccctgcacttttagaccagcgtactgtctgtttctccattgcagctttgagtactggtattacatatcagacagtaaaaccaggtcactttaacaaggatttctacgatttcataacagagcgtggattctttgaagagggatctgagttaacattaaaacattttttctttgcacagggtggtgaagctgctatgacagacttcaattattatcgctacaatagagtcacagtacttgatatttgccaagctcaatttgtttacaaaatagttggcaagtattttgaatgttatgacggtgggtgcattaatgctcgtgaagttgttgttacaaactatgacaagagtgctggctatcctttgaacaaatttggtaaagctagactttactacgaaactctttcatatgaagagcaggatgcactttttgctttaacaaagagaaatgttttacccacaatgactcaaatgaatttgaaatacgctatttctggtaaggcaagagctcgtacagtaggaggagtttcacttctttctaccatgactacgagacaatatcatcagaagcatttgaagtcaattgctgcaacacgcaatgctactgtggtcattggttcaaccaagttttatggtggttgggacaatatgcttaaaaatttaatgcgtgatgttgataatggttgtttgatgggatgggactatcctaagtgtgaccgtgctttacctaatatgattagaatggcttctgccatgatattaggttctaagcatgttggttgttgtacacataatgataggttctaccgcctctccaatgagttagctcaagtactcacagaagttgtgcattgcacaggtggtttttattttaaacctggtggtacaactagcggtgatggtactacagcatatgctaactctgcttttaacatctttcaagctgtttctgctaatgttaataagcttttgggggttgattcaaacgcttgtaacaacgttacagtaaaatccatacaacgtaaaatttacgataattgttatcgtagtagcagcattgatgaagaatttgttgttgagtactttagttatttgagaaaacacttttctatgatgattttatctgatgatggagttgtgtgctacaacaaagattatgcggatttaggttatgtagctgacattaatgcttttaaagcaacactttattaccagaataacgtctttatgtccacttctaagtgttgggtagaaccagatcttagtgttggaccacatgaattttgttcacagcatacattgcagattgttgggcctgatggagactactatcttccctatccagacccgtccagaattttgtcagctggtgtgtttgttgatgacatagttaaaacagacaatgttattatgttagaacgttacgtgtcattggctattgacgcatacccgctcacaaaacaccctaagcctgcttatcaaaaagtgttttacactctactagattgggttaaacatctacagaaaaatttgaatgcaggtgttcttgattcgttttcagtgacaatgttagaggaaggtcaagataagttctggagtgaagagttttacgctagcctctatgaaaagtccactgtcttgcaagctgcaggcatgtgtgtagtatgtggttcgcaaactgtacttcgttgtggagactgtcttaggagaccacttttatgcacgaaatgtgcttacgaccatgttatgggaacaaagcataaattcattatgtctatcacaccatatgtgtgtagttttaatggttgtaatgtcaatgatgttacaaagttgtttttaggtggtcttagttattattgtatgaaccacaaaccacagttgtcattcccactctgtgctaatggcaacgtttttggtctatataaaagtagtgcagtcggctcagaggctgttgaagatttcaacaaacttgcagtttctgactggactaatgtagaagactacaaacttgctaacaatgtcaaggaatctctgaaaattttcgctgctgaaactgtgaaagctaaggaggagtctgttaaatctgaatatgcttatgctgtattaaaggaggttatcggccctaaggaaattgtactccaatgggaagcttctaagactaagcctccacttaacagaaattcagttttcacgtgttttcagataagtaaggatactaaaattcaattaggtgaatttgtgtttgagcaatctgagtacggtagtgattctgtttattacaagagcacgagtacttacaaattgacaccaggtatgatttttgtgttgacttctcataatgtgagtcctcttaaagctccaattttagtcaaccaagaaaagtacaataccatatctaagctctatcctgtctttaatatagcggaggcctataatacactggttccttactaccaaatgataggtaagcaaaaatttacaactatccaaggtcctcctggtagcggtaaatctcattgtgttataggtttgggtttgtattaccctcaggcgagaatagtctacactgcatgttctcatgcggctgtagacgctttatgtgaaaaagcagccaaaaacttcaatgttgatagatgttcaaggataatacctcaaagaatcagagttgattgttacacaggctttaagcctaataacaccaatgcgcagtacttgttttgtactgttaatgctctaccagaagcaagttgtgacattgttgtagttgatgaggtctctatgtgtactaattatgatcttagtgtcataaatagccgactgagttacaaacatattgtttatgttggagacccacagcagctaccagctcctagaactttgattaataagggtgtacttcaaccgcaggattacaatgttgtaaccaaaagaatgtgcacactaggacctgatgtctttttgcataaatgttacaggtgcccagctgaaattgttaagacagtctctgcacttgtttatgaaaataaatttgtacctgtcaacccagaatcaaagcagtgcttcaaaatgtttgtaaaaggtcaggttcagattgagtctaactcttctataaacaacaagcaactagaggttgtcaaggcctttttagcacataatccaaaatggcgtaaagctgttttcatctcaccctataatagtcaaaattatgttgctcggcgtcttcttggtttgcaaacgcaaactgtggattccgctcagggtagtgagtatgattacgtcatctacacacagacctccgatacacagcatgctactaatgttaacagatttaatgttgccattacgagagcaaaggttggtatactttgtatcatgtgtgatagaactatgtatgagaatcttgatttctatgaactcaaagattcaaagattggtttacaagcaaaacctgaaacttgtggtttatttaaagattgttcgaagagcgaacaatacataccacctgcttatgcaacgacatatatgagcttatctgataattttaagacaagtgatggtttagctgttaacatcggtacaaaagatgttaaatatgctaatgtcatctcatatatgggattcaggtttgaagccaacataccaggctatcacacactattctgcacgcgagattttgctatgcgtaatgttagagcatggcttgggtttgacgttgaaggtgcacatgtctgtggtgataatgttggaactaatgtaccattacagctgggtttctcaaacggtgtggattttgtagtgcaaactgaaggatgtgttattactgaaaaaggtaatagcattgaggttgtaaaagcacgagcaccaccaggtgagcaatttgcacacttgattccgcttatgagaaagggtcaaccttggcacattgttagacgccgtatagtgcagatggtctgtgactattttgatggcttatcagacattctgatctttgtgctttgggctggtggtcttgaacttacaactatgagatactttgttaaaattggaagaccacaaaaatgtgaatgcggcaaaagtgcaacttgttatagtagctctcaatctgtttatgcttgcttcaagcatgcattaggatgtgattatttatataacccttactgcattgacatacagcaatggggttacacaggatctttgagcatgaatcatcatgaagtttgcaacattcatagaaatgagcatgtagctagtggtgatgctatcatgactagatgtctcgctatacatgactgttttgtcaaacgtgttgattggtcaattgtgtacccttttattgacaatgaagaaaagatcaataaagctggtcgcatagtgcagtcacatgtcatgaaagctgctctgaagatttttaatcctgctgcaattcacgatgtgggtaatccaaaaggcatccgttgtgctacaacaccaataccatggttttgttatgatcgtgatcctattaataacaatgttagatgtctggattatgactatatggtacatggtcaaatgaatggtcttatgttattttggaactgtaatgtagacatgtacccagagttttcaattgtttgtagatttgatactcgcactcgctctaaattgtctttagaaggttgtaatggtggtgcattgtatgttaataaccatgctttccacacaccagcttatgatagaagagcttttgctaagcttaaacctatgccattcttttactatgatgatagtaattgtgaacttgttgatgggcaacctaattatgtaccacttaagtcaaatgtttgcataacaaaatgcaacattggtggtgctgtctgcaagaagcatgctgctctttacagagcgtatgttgaggattacaacatttttatgcaggctggttttacaatatggtgtcctcaaaactttgacacctatatgctttggcatggttttgttaatagcaaagcacttcagagtctagaaaatgtggcttttaatgtcgttaagaaaggtgccttcaccggtttaaaaggtgacttaccaactgctgttattgctgacaaaataatggtaagagatggacctactgacaaatgtatttttacaaataagactagtttacctacaaatgtagcttttgagttatatgcaaaacgcaaacttggactcacacctccattaacaatacttaggaatttaggtgttgtcgcaacatataagtttgtgttgtgggattatgaagctgaacgtcctttctcaaatttcactaagcaagtgtgttcctacactgatcttgatagtgaagttgtaacatgttttgataatagtattgctggttcttttgagcgttttactactacaagagatgcagtgcttatttctaataacgctgtgaaagggcttagtgccattaaattacaatatggccttttgaatgatctacctgtaagtactgttggaaataaacctgtcacatggtatatctatgtgcgcaagaatggtgagtacgtcgaacaaatcgatagttactatacacagggacgtacttttgaaaccttcaaacctcgtagtacaatggaagaagattttcttagtatggatactacactcttcatccaaaagtatggtcttgaggattatggttttgaacacgttgtatttggagatgtctctaaaactaccattggtggtatgcatcttcttatatcgcaagtgcgccttgcaaaaatgggtttgttttccgttcaagaatttatgaataattctgacagtacactgaaaagttgttgtattacatatgctgatgatccatcttctaagaatgtgtgcacttatatggacatactcttggacgattttgtgactatcattaagagcttagatcttaatgttgtgtccaaagttgtggatgtcattgtagattgtaaggcatggagatggatgttgtggtgtgagaattcacatattaaaaccttctatccacaactccaatctgctgaatggaatcccggctatagcatgcctacactgtacaaaatccagcgtatgtgtctcgaacggtgtaatctctacaattatggtgcacaagtgaaattacctgatggcattactactaatgtcgttaagtatactcagttgtgtcaataccttaacactactacattgtgtgtaccacacaaaatgcgtgtattgcatttaggagctgctggtgcatctggtgttgctcctggtagtactgtattaagaagatggttaccagatgatgccatattggttgataatgatttgagagattacgtttccgacgcagacttcagtgttacaggtgattgtactagtctttacatcgaagacaagtttgatttgctcgtctctgatttatatgatggctccacaaaatcaattgacggtgaaaacacgtcgaaagatggtttctttacttatattaatggtttcattaaagagaaactgtcacttggtggatctgttgccattaaaatcacggaatttagttggaataaagatttatatgaattgattcaaagatttgagtattggactgtgttttgtacaagtgttaacacgtcatcatcagaaggctttctgattggtattaactacttaggaccatactgtgacaaagcaatagtagatggaaatataatgcatgccaattatatattttggagaaactctacaattatggctctatcacataactcagtcctagacactcctaaattcaagtgtcgttgtaacaacgcacttattgttaatttaaaagaaaaagaattgaatgaaatggtcattggattactaaggaagggtaagttgctcattagaaataatggtaagttactaaactttggtaaccacttcgttaacacaccatgaaaaaactatttgtggttttggtcgtaatgccattgatttatggagacaattttccttgttctaaattgactaatagaactataggcaaccagtggaatctcattgaaaccttccttctaaactatagtagtaggttaccacctaattcagatgtggtgttaggtgattattttcctactgtacaaccttggtttaattgcattcgcaatgatagtaatgacctttatgttacactggaaaatcttaaagcattgtattgggattatgctacagaaaatatcacttggaatcacagacaacggttaaacgtagtcgttaatggatacccatactccatcacagttacaacaacccgcaattttaattctgctgaaggtgctattatatgcatttgtaagggctcaccacctactaccaccacagaatctagtttgacttgcaattggggtagtgagtgcaggttaaaccataagttccctatatgtccttctaattcagaggcaaattgtggtaatatgctgtatggcctacaatggtttgcagatgaggttgttgcttatttacatggtgctagttaccgtattagttttgaaaatcaatggtctggcactgtcacatttggtgatatgcgtgcgacaacattagaagtcgctggcacgcttgtagacctttggtggtttaatcctgtttatgatgtcagttattatagggttaataataaaaatggtactaccgtagtttccaattgcactgatcaatgtgctagttatgtggctaatgtttttactacacagccaggaggttttataccatcagattttagttttaataattggttccttctaactaatagctccacgttggttagtggtaaattagttaccaaacagccgttattagttaattgcttatggccagtccctagctttgaagaagcagcttctacattttgttttgagggtgctggctttgatcaatgtaatggtgctgttttaaataatactgtagacgtcattaggttcaaccttaattttactacaaatgtacaatcaggtaagggtgccacagtgttttcattgaacacaacgggtggtgtcactcttgaaatttcatgttatacagtgagtgactcgagctttttcagttacggtgaaattccgttcggcgtaactgatggaccacggtactgttacgtacactataatggcacagctcttaagtatttaggaacattaccacctagtgtcaaggagattgctattagtaagtggggccatttttatattaatggttacaatttctttagcacatttcctattgattgtatatcttttaatttgaccactggtgatagtgacgttttctggacaatagcttacacatcgtacactgaagcattagtacaagttgaaaacacagctattacaaaggtgacgtattgtaatagtcacgttaataacattaaatgctctcaaattactgctaatttgaataatggattttatcctgtttcttcaagtgaagttggtcttgtcaataagagtgttgtgttactacctagcttttacacacataccattgttaacataactattggtcttggtatgaagcgtagtggttatggtcaacccatagcctcaacattaagtaacatcacactaccaatgcaggatcacaacaccgatgtgtactgtattcgttctgaccaattttcagtttatgttcattctacttgcaaaagtgctttatgggacaatatttttaagcgaaactgcacggacgttttagatgccacagctgttataaaaactggtacttgtcctttctcatttgataaattgaacaattacttaacttttaacaagttctgtttgtcgttgagtcctgttggtgctaattgtaagtttgatgtagctgcccgtacaagaaccaatgagcaggttgttagaagtttgtatgtaatatatgaagaaggagacaacatagtgggtgtaccgtctgataatagtggtgtgcacgatttgtcagtgctacacctagattcctgcacagattacaatatatatggtagaactggtgttggtattattagacaaactaacaggacgctacttagtggcttatattacacatcactatcaggtgatttgttaggttttaaaaatgttagtgatggtgtcatctactctgtaacgccatgtgatgtaagcgcacaagcagctgttattgatggtaccatagttggggctatcacttccattaacagtgaactgttaggtctaacacattggacaacaacacctaatttttattactactctatatataattacacaaatgataggactcgtggcactgcaattgacagtaatgatgttgattgtgaacctgtcataacctattctaacataggtgtttgtaaaaatggtgcttttgtttttattaacgtcacacattctgatggagacgtgcaaccaattagcactggtaatgtcacgatacctacaaactttaccatatccgtgcaagtcgaatatattcaggtttacactacaccagtgtcaatagactgttcaagatatgtttgtaatggtaaccctaggtgtaacaaattgttaacacaatacgtttctgcatgtcaaactattgagcaagcacttgcaatgggtgccagacttgaaaacatggaggttgattccatgttgtttgtttctgaaaatgcccttaaattggcatctgttgaagcattcaatagttcagaaactttagaccctatttacaaagaatggcctaatataggtggttcttggctagaaggtctaaaatacatacttccgtcccataatagcaaacgtaagtatcgttcagctatagaggacttgctttttgataaggttgtaacatctggtttaggtacagttgatgaagattataaacgttgtacaggtggttatgacatagctgacttagtatgtgctcaatactataatggcatcatggtgctacctggtgtggctaatgctgacaaaatgactatgtacacagcatcccttgcaggtggtataacattaggtgcacttggtggaggcgccgtggctataccttttgcagtagcagttcaggctagacttaattatgttgctctacaaactgatgtattgaacaaaaaccagcagattctggctagtgctttcaatcaagctattggtaacattacacagtcatttggtaaggttaatgatgctatacatcaaacatcacgaggtcttgctactgttgctaaagcattggcaaaagtgcaagatgttgtcaacatacaagggcaagctttaagccacctaacagtacaattgcaaaataatttccaagccattagtagttctattagtgacatttataataggcttgacgaattgagtgctgatgcacaagttgacaggctgatcacaggaagacttacagcacttaatgcatttgtgtctcagactctaaccagacaagcggaggttagggctagtagacaacttgccaaagacaaggttaatgaatgcgttaggtctcagtctcagagattcggattctgtggtaatggtacacatttgttttcactcgcaaatgcagcaccaaatggcatgattttctttcacacagtgctattaccaacggcttatgaaactgtgactgcttggccaggtatttgtgcttcagatggtgatcgcacttttggacttgtcgttaaagatgtccagttgactttgtttcgtaatctagatgacaagttctatttgacccccagaactatgtatcagcctagagttgcaactagttctgactttgttcaaattgaagggtgcgatgtgctgtttgttaatgcaactgtaagtgatttgcctagtattatacctgattatattgatattaatcagactgttcaagacatattagaaaattttagaccaaattggactgtacctgagttgacatttgacatttttaacgcaacctatttaaacctgactggtgaaattgatgacttagaatttaggtcagaaaagctacataacaccactgtagaacttgccattctcattgacaacattaacaatacattagtcaatcttgaatggctcaatagaattgaaacctatgtaaaatggccttggtatgtgtggctactaataggcttagtagtaatattttgcataccattactgctattttgctgttgtagtacaggttgctgtggatgcataggttgtttaggaagttgttgtcactctatatgtagtagaagacaatttgaaaattacgaaccaattgaaaaagtgcacgtccattaaatttaaaatgttaattctatcatctgctataatagcagttgtttctgctagagaattttgttaaggatgatgaataaagtctttaagaactaaacttacgagtcattacaggtcctgtatggacattgtcaaatccatttacacatccgtagatgctgtacttgacgaacttgattgtgcatactttgctgtaactcttaaagtagaatttaagactggtaaattacttgtgtgtataggttttggtgacacacttcttgctgctaaggataaagcatatgctaagcttggtctctccattattgaagaagtcaatagtcatatagttgtttaatatcattaaacacacaaaacccaaagcattaagtgttacaaaacaattaaagagagattatagaaaaactgtcattctaaattccatgcgaaaatgattggtggactttttcttagtactctgagttttgtaattgttagtaaccattctattgttaataacacagcaaatgtgcatcatatacaacaagaacgtgttatagtacaacagcatcatgttgttagtgctagaacacaaaactattacccagagttcagcatcgctgtactctttgtatcttttctagctttgtaccgtagtacaaactttaagacgtgtgtcggcatcttaatgtttaagattttatcaatgacacttttaggacctatgcttatagcatatggttactacattgatggcattgttacaacaactgtcttatctttaagatttgtctacttagcatacttttggtatgttaatagtaggtttgaatttattttatacaatacaacgacactcatgtttgtacatggcagagctgcaccgtttatgagaagttctcacagctctatttatgtcacattgtatggtggcataaattatatgtttgtgaatgacctcacgttgcattttgtagaccctatgcttgtaagcatagcaatacgtggcttagctcatgctgatctaactgtagttagagcagttgaacttctcaatggtgattttatttatgtattttcacaggagcccgtagtcggtgtttacaatgcagccttttctcaggcggttctaaacgaaattgacttaaaagaagaagaagaagaccatacctatgacgtttcctagggcattgactgtcatagatgacaatggaatggtcattaacatcattttctggttcctgttgataattatattgatattactttcaatagcattgctaaatataattaagctatgcatggtgtgttgcaatttaggaaggacagttattattgttccagcgcaacatgcttacgatgcctataagaattttatgcgaattaaagcatacaaccccgatggagcactccttgcttgaactaaacaaaatgaagattttgttaatattagcgtgtgtgattgcatgcgcatgtggagaacgctattgtgctatgaaatccgatacagatttgtcatgtcgcaatagtacagcgtctgattgtgagtcatgcttcaacggaggcgatcttatttggcatcttgcaaactggaacttcagctggtctataatattgatcgtttttataactgtgctacaatatggaagacctcaattcagctggttcgtgtatggcattaaaatgcttataatgtggctattatggcccgttgttttggctcttacgatttttaatgcatactcggaataccaagtgtccagatatgtaatgttcggctttagtattgcaggtgcaattgttacatttgtactctggattatgtattttgtaagatccattcagttgtacagaaggactaagtcttggtggtctttcaaccctgaaactaaagcaattctttgcgttagtgcattaggaagaagctatgtgcttcctctcgaaggtgtgccaactggtgtcactctaactttgctttcagggaatttgtacgctgaagggttcaaaattgcaggtggtatgaacatcgacaatttaccaaaatacgtaatggttgcattacctagcaggactattgtctacacacttgttggcaagaagttgaaagcaagtagtgcgactggatgggcttactatgtaaaatctaaagctggtgattactcaacagaggcaagaactgataatttgagtgagcaagaaaaattattacatatggtataactaaacttctaaatggccaaccagggacaacgtgtcagttggggagatgaatctaccaaaacacgtggtcgttccaattcccgtggtcggaagaataataacatacctctttcattcttcaaccccataaccctccaacaaggttcaaaattttggaacttatgtccgagagactttgtacccaaaggaataggtaacagggatcaacagattggttattggaatagacaaactcgctatcgcatggtgaagggccaacgtaaagagcttcctgaaaggtggttcttctactacttaggtactggacctcatgcagatgccaaatttaaagataaattagatggagttgtctgggttgccaaggatggtgccatgaacaaaccaaccacgcttggtagtcgtggtgctaataatgaatccaaagctttgaaattcgatggtaaagtgccaggcgaatttcaacttgaagttaatcaatcaagagacaattcaaggtcacgctctcaatctagatctcggtctagaaatagatctcaatctagaggcaggcaacaattcaataacaagaaggatgacagtgtagaacaagctgttcttgccgcacttaaaaagttaggtgttgacacagaaaaacaacagcaacgctctcgttctaaatctaaagaacgtagtaactctaagacaagagatactacacctaagaatgaaaacaaacacacctggaagagaactgcaggtaaaggtgatgtgacaagattttatggagctagaagcagttcagccaattttggtgacactgacctcgttgccaatgggagcagtgccaagcattacccacaactggctgaatgtgttccatctgtgtctagcattctgtttggaagctattggacttcaaaggaagatggcgaccagatagaagtcacgttcacacacaaataccacttgccaaaggatgatcctaagactggacaattccttcagcagattaatgcctatgctcgtccatcagaagtggcaaaagaacagagaaaaagaaaatctcgttctaaatctgcagaaaggtcagagcaagatgtggtacctgatgcattaatagaaaattatacagatgtgtttgatgacacacaggttgagataattgatgaggtaacgaactaaacgagatgctcgtcttcctccatgctgtatttattacagttttaatcttactactaattggtagactccaattattagaaagactattacttaatcactctttcaatcttaaaactgtcaatgactttaatatcttatataggagtttagcagaaaccagattactaaaagtggtgcttcgagtaatctttctagtcttactaggattttgctgctacagattgttagtcacattaatgtaaggcaacccgatgtctaaaactggtttttccgaggaattactggtcatcgcgctgtctactcttgtacagaatggtaagcacgtgtaataggaggtacaagcaaccctattgcatattaggaagtttagatttgatttggcaatgctagatttagtaatttagagaagtttaaagatccgctacgacgagccaacaatggaagagctaacgtctggatctagtgattgtttaaaatgtaaaattgtttgaaaattttccttttgatagtgatacaaaaaa

SEQ ID NO: 30056 - DNA, 27317 bp, Human Coronavirus 229E
  misc_structure (12514)...(12596): Frameshift Site
  misc_structure (12514)...(12520): Slippery Site
  misc_structure (12527)...(12596): Pseudoknot
  misc_structure (12527)...(12537): Stem 1 up
  misc_structure (12540)...(12544): Stem 2 down
  misc_structure (12547)...(12556): Stem 1 down
  misc_structure (12587)...(12591): Stem 2 up
acttaagtaccttatctatctacagatagaaaagttgctttttagactttgtgtctacttttctcaactaaacgaaatttttgctatggccggcatctttgatgctggagtcgtagtgtaattgaaatttcatttgggttgcaacagtttggaagcaagtgctgtgtgtcctagtctaagggtttcgtgttccgtcacgagattccattctacaaacgccttactcgaggttccgtctcgtgtttgtgtggaagcaaagttctgtctttgtggaaaccagtaactgttcctaatggcctgcaaccgtgtgacacttgccgtagcaagtgattctgaaatttctgcaaatggctgttctactattgcgcaagccgtccgccgttatagcgaggccgctagcaatggttttagggcatgccgatttgtttcattagatttgcaggattgcatcgttggcattgcagacgatacatatgttatgggtctgcatggcaatcagacgttgttttgcaacataatgaaattttctgaccgtccttttatgcttcatgggtggttggttttttccaattcaaattaccttttggaggaatttgatgttgtcttcggtaagagaggtggtggtaatgtgacatacactgaccagtatctctgtggcgccgatggcaaacctgttatgagtgaagatttatggcagtttgttgaccatttcggtgagaacgaagaaattatcatcaatggtcatacttacgtttgtgcttggcttactaagcgtaagcccttagattacaaacgtcagaacaaccttgccattgaagagattgaatatgtgcatggtgatgctttgcatacactacgcaatggttctgttcttgaaatggctaaggaagtgaagacatctagtaaagttgtgttaagcgatgctcttgacaaactttacaaagtctttggttctcctgttatgacaaatggttccaacatcctagaggcctttactaaacctgtgtttattagtgcattagttcaatgtacttgtggtaccaagtcttggtctgttggtgattggaccggttttaaatcctcttgttgcaacgtgatcagtaataaactgtgtgttgttcccggtaatgttaaacctggtgatgctgtgattaccactcagcaagctggtgctggtattaagtatttttgtggcatgactcttaagtttgttgcaaatattgaaggtgtctctgtttggagagtgattgctcttcagagtgtggattgctttgttgcttcttccacttttgtagaagaggaacatgttaatagaatggatacattctgcttcaatgtacgcaatagtgttactgatgagtgtcgtctggccatgttgggtgctgaaatgactagtaatgtcagaagacaagttgcttcaggtgtcatagacattagtaccggttggtttgatgtttatgatgacatctttgctgaaagcaaaccatggtttgttcgcaaggctgaagacatttttggcccttgttggtccgctcttgcttctgcacttaaacaacttaaagtcactacaggtgaacttgtgagatttgttaagtctatttgcaattcagctgttgctgtcgtgggtggtactatacaaattctcgctagtgtgcctgagaagtttttgaatgcgtttgacgtgtttgtcacagctattcaaactgtctttgactgtgctgttgaaacttgtactattgccggtaaagcatttgacaaggtttttgactatgttttgcttgataatgcgcttgtaaaacttgtcaccacaaagcttaagggtgttcgtgaacgtggccttaataaagttaagtatgcaacagttgttgttggttccactgaagaagttaaatcttcacgtgttgaacgtagcactgctgtacttacaatcgccaacaattattccaaactttttgatgaagggtatactgttgtaattggcgatgtggcgtactttgttagtgacggctacttccgtcttatggccagtccaaatagtgtgttgactactgcagtctataaaccattgtttgcttttaatgtgaatgttatgggtactagacctgaaaaatttccaaccactgtgacttgtgaaaatttagagtctgctgttttgtttgttaatgacaaaattactgaattccaattggattacagtattgatgtcattgataatgaaataattgtcaaacctaatatcagcctatgtgttccactttatgtgagagactatgttgacaaatgggatgatttttgcagacaatatagtaacgagtcttggtttgaggatgattacagggcttttatcagtgttttggacatcactgatgctgctgtgaaagctgcagagtctaaagctttcgttgatactattgttccaccttgcccatctattttgaaagttatagatggaggcaaaatatggaatggtgttattaaaaatgttaactctgttagagactggcttaagtctttgaagttaaatctcacacaacagggtttgcttggaacatgtgcaaagcgttttaaacgttggcttggcattttgctagaggcctataatgcgtttttagacactgtggtttctactgttaaaattggtggcttgacctttaaaacatatgcttttgataaaccttacattgtgatacgtgatatcgtgtgtaaggttgaaaataaaacagaagcagaatggattgagctttttccacataatgacaggattaagtcttttagtactttcgagagtgcttacatgccaattgcagaccctacacattttgacattgaagaagttgaacttttagatgcagagtttgtagaaccaggctgtggtggtattttggcagtaatagatgagcacgtcttttataagaaggatggtgtttattatccatcaaatggtactaacattctacctgttgcatttacaaaagccgctggtggtaaagtttcattttctgatgacgttgaagtaaaagacattgaacctgtttacagagtcaagctttgctttgagtttgaagatgaaaaacttgtagatgtttgtgaaaaggcaattggcaagaaaattaaacatgaaggtgactgggatagcttttgtaagactattcaatcagcactttctgttgtttcttgctatgtaaatctacctacttattacatttatgatgaagaaggcggtaatgacttgagtttgcccgttatgatttctgaatggcctctttctgttcaacaagctcaacaagaagctactttacctgatattgctgaggatgttgttgaccaagttgaagaagtcaatagcatttttgacattgagacagtggatgttaaacatgatgtgagtccttttgaaatgccatttgaagagttaaatggtttaaagatactcaaacaattggataacaactgctgggttaactcagttatgttacaaatacaattaactggtatacttgatggtgactatgctatgcagttttttaaaatgggccgagttgccaagatgattgaacgctgctacactgctgagcaatgtatacgtggtgctatgggtgatgttggtttgtgtatgtatagactgcttaaagacttacacactggttttatggttatggattataaatgtagttgtaccagtggtaggcttgaagaatcgggagctgttttgttttgtacgcccactaagaaggcgtttccttatggtacttgtctaaattgtaacgcacctcgcatgtgtacaattaggcagttacaaggtaccataatatttgtgcaacaaaaaccagaacctgttaatcctgtttcttttgttgttaaaccagtctgctcatcaatttttcgtggtgctgtgtcttgtggtcattaccagactaacatctattcacaaaatttgtgtgtggatggttttggtgttaacaagattcagccctggacaaatgatgcacttaatactatttgtattaaggatgcagattataatgcaaaagttgaaatatctgttacaccaattaaaaatacagttgatacaacacctaaggaagaatttgttgttaaagagaagttgaacgccttcctcgttcatgacaatgtagctttctaccaaggtgatgttgatactgttgttaatggtgttgactttgactttattgtaaatgctgctaatgagaaccttgctcatggtggaggacttgccaaagctttagatgtgtacactaaaggtaaacttcaacgtttatctaaagaacacattggattagcgggtaaagtaaaagttggtacaggagttatggttgagtgtgatagccttagaatttttaatgttgttggtccacgcaagggtaaacatgaacgtgatttactcataaaagcttacaacactattaataatgaacaaggcacacctttaacaccaattttgagctgtggtatttttggtatcaaactcgaaacttcattagaagttttgcttgatgtttgtaatacaaaagaagttaaagtttttgtttatacagacacagaggtttgtaaggttaaggattttgtgtctggtttagtgaatgttcaaaaagttgagcaacctaaaatagaaccaaaaccagtgtccgtaattaaagttgcacccaagccttacagggtagatggtaaatttagttactttacagaagacttgttgtgtgtcgctgatgacaaacccattgttttgtttactgactctatgcttactttggatgaccgtggtttagctctagacaatgcacttagtggtgtgcttagtgctgctattaaggattgtgttgacataaataaagctataccttctggtaatcttattaagtttgatataggttctgttgttgtctacatgtgtgttgtgccatccgaaaaggacaaacatttagataataatgttcaacgatgcacacgtaagttgaatagacttatgtgtgatatagtttgtactataccagctgactacatcttgccattggtgttgtctagtttgacttgtaatgtttcttttgtaggtgaacttaaagctgctgaagctaaagttataactataaaggtgacagaggatggtgttaatgttcatgatgtgaccgtgacaacagacaagtcatttgaacaacaagttggtgttattgctgataaggacaaagatctttctggtgcagtaccaagtgatcttaacacatctgaattgcttactaaagcaatagatgttgattgggtcgaattttatggctttaaagatgctgttacttttgcaacagttgatcatagtgcttttgcctatgaaagtgctgttgttaatggtattagagtgttaaaaactagtgataataattgttgggtgaatgctgtttgtattgcactacagtattcgaaaccccattttatttcacaaggtcttgatgctgcgtggaataaatttgttttaggcgatgttgaaatttttgttgcatttgtttactatgttgcaagactaatgaaaggtgacaagggtgatgctgaagacactttgactaagttgtctaagtatcttgctaatgaagctcaagttcaattagaacattatagttcttgtgttgaatgtgatgctaaatttaaaaactctgttgcatctatcaattctgctatagtttgtgctagtgtcaaacgtgatggtgtgcaagttggttattgtgtccatggtattaagtactattcacgtgttagaagtgttagaggtagagctattatagtcagtgtcgaacagcttgaaccgtgtgctcagtctagacttttgagtggtgttgcttatactgctttttctggacctgttgacaaaggtcattatactgtttatgatactgcaaagaaatcaatgtatgatggtgatcgttttgttaaacatgatctttctctgctgtctgtcacatcagttgttatggttggtggttatgttgcacctgttaatacagtgaaacctaaaccagtcattaatcaacttgatgaaaaggcacagaagttctttgattttggtgattttttgattcataattttgttatttttttcacatggttattgagtatgtttactttgtgtaaaactgcagtaactacaggtgatgttaaaataatggccaaagcaccacaaaggacgggtgttgttttaaaacgtagtcttaaatataacttaaaagcgtcagcagctgttcttaaatctaagtggtggctgcttgctaagtttacgaaactactgttactcatatatacattgtactcagtagttttgctttgtgtacgttttggaccgtttaatttttgtagtgagactgttaatggttatgctaagtcaaactttgtcaaggatgattactgtgatggttcattgggctgcaagatgtgtctttttggttaccaagagttaagtcaatttagccatttggatgttgtgtggaagcatataacagaccctttgtttagtaatatgcaacctttcattgtcatggttttgctgcttatatttggtgacaattatttgagatgcttcttgctgtattttgttgctcagatgataagcacagttggtgtttttctaggttacaaggaaacaaattggttcttgcactttattccatttgatgttatttgtgatgaactgcttgtcactgttattgttattaaggttatttcttttgtcagacatgtgctttttggttgtgaaaacccagattgtattgcgtgttctaagagtgctagacttaagagattccctgttaacacaattgtcaatggtgtgcaacgttcattttatgttaatgcaaatggtggtagtaagttttgtaagaaacatagatttttctgtgttgattgtgactcttatggttatggcagcacgtttataacacccgaagtttctagagaacttggtaacattaccaaaacaaatgtgcaaccaacagggccggcctatgtcatgattgacaaagtggagtttgaaaatggtttttacagattgtattcctgtgaaacattttggcgttacaactttgatataactgaaagcaagtattcttgcaaagaggtttttaaaaattgtaatgttttggatgatttcatcgtgtttaacaataatgggaccaatgtaacgcaggttaaaaatgctagtgtttacttttcacagttgttgtgtaggcccattaaattagttgacagtgaacttttgtccactttgtcagttgattttaatggtgtcttacacaaggcatacattgatgtactacgtaatagctttggtaaagatcttaatgctaatatgtctttagccgagtgcaagagagctttaggcctgtctattagtgatcatgaatttactagtgctatttctaatgcacatcgttgtgacgtgttgttatctgatttgtcatttaacaactttgtcagttcgtatgctaaacctgaggaaaaattatcagcttatgacttggcgtgttgtatgcgtgcaggtgctaaggttgttaatgccaatgttctgacaaaggaccaaactcctattgtttggcatgcaaaggattttaacagtctttctgctgaaggtcgcaagtatattgtaaaaactagcaaagctaagggtttgactttcttgttgacaattaatgaaaaccaagctgtcacgcaaatacctgcaactagcattgttgctaagcaaggtgctggtgatgctggccattcattaacatggctgtggctactgtgtggtcttgtgtgtttgattcaattctacttgtgctttttcatgccctattttatgtacgatatcgtgagtagttttgagggttatgattttaagtatatagaaaatggtcagttgaagaattttgaagcgccacttaaatgcgtcagaaacgtttttgaaaactttgaggactggcattatgctaagtttggcttcacacctttaaacaagcaaagctgtcctattgtagttggagtttctgaaattgttaatactgtcgctggcattccatctaatgtgtatcttgttggtaaaactttaatttttacactacaagctgcttttggtaatgctggtgtttgttatgacatttttggagtcacaacacctgaaaagtgcatttttacttctgcttgtactagattagaaggtttgggtggtaacaatgtttattgttataacacagcgcttatggaaggttctttgccttacagttcaatacaagctaatgcatattataaatatgacaatggcaattttattaagttgccagaagttattgcacaaggctttggttttagaacagtgcgtactattgccaccaaatactgccgcgtaggtgaatgtgttgaatccaatgcaggtgtgtgttttggctttgacaagtggtttgttaacgatggacgtgttgccaatggttacgtttgtggtactggtttgtggaaccttgtatttaacatactttccatgttttcatcttcattctctgttgctgcaatgtcaggtcaaattttacttaattgtgcattaggtgcttttgctattttttgttgttttcttgtgacaaagtttagacgcatgtttggtgacctttctgtaggtgtttgcactgttgttgtggctgttttgcttaacaatgtctcttacattgtaactcagaatttagtaacaatgattgcttatgccatattgtatttctttgctactagaagcttacgctatgcatggatttggtgtgctgcatatttaattgcgtatatttcttttgctccatggtggttgtgtgcttggtactttcttgctatgttgacaggtttgttacctagtttgctgaagcttaaagtttcgacaaatcttttcgaaggtgacaaatttgtaggtacatttgaaagtgctgctgcaggaacatttgtcattgacatgcgttcttatgagaaacttgctaatagcatctctccagaaaagttgaaaagttatgctgctagctataatagatataagtactatagtggtaatgcaaatgaagctgattaccgttgcgcttgttatgcctatttagcaaaagcaatgttggacttttcgcgtgatcataatgacatcttgtacacacctccgactgtcagttatggttctacattacaggctggtttgcgcaaaatggcacaaccatctggctttgtggagaaatgtgttgtccgtgtctgctatggaaacactgtgttgaatgggttgtggcttggtgatattgtttattgcccacgtcatgttatcgcatctaacacaacttctgctatagattatgatcacgaatatagtattatgcggttgcataatttttctataatatctggtacagcatttcttggtgttgtaggtgctactatgcatggagtaactcttaaaattaaggtttcacagactaacatgcacacacctagacattcttttagaacactaaaatctggtgaaggttttaacatcttagcatgctatgatggttgtgctcaaggtgtttttggtgtgaacatgagaactaattggactatccgtggttcatttattaatggtgcgtgtggttcccctggctacaatcttaaaaatggcgaggtggaatttgtttatatgcatcaaattgaactcggaagtggtagccatgtaggttctagctttgatggtgttatgtatggtggttttgaagaccaacctaatcttcaagttgaatctgcaaaccagatgttaacagttaatgtggttgcatttctttatgctgctatattgaatggttgcacatggtggcttaaaggtgaaaaattgtttgtggagcattataatgagtgggcacaggctaatggtttcacagctatgaatggtgaagacgctttttccattcttgctgctaaaactggtgtctgtgtggaaagattacttcatgctattcaagttttgaataatggctttggtggtaaacaaattttgggttattctagtctcaatgatgagttcagtattaatgaagttgtcaaacaaatgtttggtgttaacctgcaaagtggtaaaaccactagtatgtttaaatccataagcttatttgctggcttctttgtcatgttctgggctgaattatttgtttataccaccactatttgggttaaccctggttttcttactccgtttatgattttgcttgttgctttgtcactctgtcttacatttgttgttaaacataaggttttgtttttgcaagtgtttttgttgccttcaattattgtggctgctattcaaaactgtgcttgggactaccatgttacaaaggtgttggcagagaagtttgattataatgtttctgttatgcaaatggacatccagggttttgttaacatttttatttgtctttttgttgcactgttgcatacttggcgctttgctaaagagcgttgtacacattggtgcacttatttgttctcactcattgctgttttatacactgcattgtatagttatgactacgttagtttgctggttatgctactttgtgcaatttctaatgaatggtatattggtgctattatttttagaatttgtcgttttggtgttgcatttttaccagtggaatacgtgtcttactttgatggtgttaaaactgtgctgttgttttacatgttgttaggctttgttagctgtatgtactatggtttgttgtactggattaacaggttctgtaagtgcacattaggtgtttatgatttctgtgttagtccagccgaatttaagtatatggttgctaatggtttgaatgcaccaaatggcccttttgatgcgctctttctgtcttttaaactaatgggtattggcggtcctagaaccattaaagtttctactgtacagtctaaattgactgatcttaagtgcacaaacgtcgttctaatgggcattttgtctaacatgaacatagcttctaattcaaaggagtgggcatattgtgttgaaatgcacaataaaataaacttgtgtgacgaccctgaaactgctcaagagttattgctggcgttgttggcctttttcttgtctaagcatagtgattttggtcttggtgatcttgtcgattcttattttgagaacgactccattttgcaaagtgttgcatcttcttttgttggtatgccatcttttgttgcatatgaaacagcaagacaagagtatgaaaatgctgttgcaaatggttcctcaccacaaataatcaaacaattgaagaaggctatgaatgttgcaaaagctgagtttgacagggaatcatctgttcaaaagaaaattaacagaatggctgaacaagctgctgcagctatgtacaaagaagcacgtgctgttaatagaaaatcaaaagttgttagtgccatgcatagtttactctttggcatgctccgacgtttggacatgtctagtgttgacactatccttaatatggcacgtaatggtgttgtccctctttccgttatccctgctacttctgcagccaggctcgtcgtcgtagtaccagatcatgattcatttgtgaaaatgatggtagatggttttgtgcactacgctggtgttgtttggacattacaggaagttaaggataatgatggtaagaatgtgcatcttaaagatgttacaaaggaaaaccaggaaatacttgtttggcctctgattttgacttgtgaacgtgtcgttaaattgcagaacaatgaaataatgccgggcaagatgaaggtcaaggccaccaaaggtgaaggtgatggaggcattactagtgaaggtaatgctctatacaacaatgaaggtggacgtgcattcatgtatgcatatgtgactacgaagcctggcatgaagtatgttaaatgggaacatgactctggtgtggttacagttgaattggaaccaccttgcagatttgttatagacacacctactggaccccaaattaagtatctttattttgttaagaatcttaacaatttaaggagaggtgctgttttgggttacattggtgccactgtgagattgcaagctggcaaacagactgagtttgtttcaaactcccatttattaacacattgttcttttgctgttgacccagctgcagcctatcttgatgctgttaaacaaggcgcaaaacctgttggcaattgtgtaaagatgttgactaatggttctggtagcggtcaggctattacttgtaccattgattccaacactacgcaggacacatatggtggcgcgtctgtttgtatttattgcagagcacatgttgcacatccaaccatggacggtttttgtcagtacaaaggcaagtgggtacaagtgcctataggtacaaatgaccctataagattttgtcttgaaaatactgtttgtaaagtttgtggttgttggcttaatcatggctgtacatgtgaccggactgctatccaaagttttgataacagttatttaaacgagtccggggctctagtgccgctcgactagagccctgtaatggtacagacatagattactgtgtccgtgcatttgacgtttacaataaagatgcgtcttttatcggaaaaaatctgaagtccaattgtgtgcgcttcaagaatgtagataaggatgacgcgttctatattgttaaacgttgcattaagtcagttatggaccacgagcagtccatgtataacttacttaaaggctgtaatgctgttgctaagcatgatttctttacttggcatgagggcagaaccatttatggtaatgttagtagacaggatcttactaaatacaccatgatggatttgtgcttcgctctgcgtaactttgatgaaaaagactgtgaagtttttaaggagatattggttcttactggttgttgtagtactgattactttgaaatgaagaattggtttgaccccatagaaaatgaggacatacaccgtgtgtatgctgctttaggtaaggtagttgcaaatgcaatgcttaagtgtgttgctttttgcgacgaaatggtgctcaaaggagttgttggtgttttgaccttagacaaccaagatcttaatgggaatttctatgacttcggtgactttgtattgtgtcctcctggaatgggaataccctactgcacgtcatactattcttatatgatgcctgttatgggtatgactaattgtttagctagtgagtgctttatgaaaagtgacatctttggtcaagacttcaaaacttttgatttgttgaaatatgatttcacagaacataaggaggttttgtttaacaagtactttaagtattggggacaggattatcatcctgattgtgttgattgccatgacgagatgtgtattttgcattgttcaaattttaacacactcttcgcaaccacaattccaaacacggcttttggacctctatgcagaaaagtgtttattgatggtgtacccgtagttgctactgctggttaccactttaaacaattaggacttgtgtggaacaaagatgttaacactcattctaccagacttactattactgaactcttacagtttgtgacagatccaacgcttatagttgcgtcatcgcctgccttggtggataaacgcactgtttgtttttctgtcgctgctttgagtacaggattaacatcccaaacagtaaaacctggccattttaataaggagttttatgacttcttacgttctcaggggtttttcgatgagggttcagaattaacattgaagcatttcttttttacacaaaagggtgatgctgcaattaaagattttgattattatcgttacaacagacctactatgctggatattggacaagctcgcgtagcatatcaagtggcagctcgctattttgactgttacgagggtggctgtattacatctagagaggttgttgttacaaaccttaataaaagcgctggttggccccttaataagtttggtaaagctggtttatattatgagtctattagttatgaggaacaagatgctattttttcattaacaaagcgtaatattctccctactatgactcagttaaatcttaaatacgccatatctggtaaggaacgcgcacgtacagtgggtggcgtctctttattagctactatgactacaagacagtttcatcagaaatgtctgaaatccatagtagctaccagaaatgccaccgttgttatcggcactaccaagttttatggcgggtgggataatatgttaaagaacctgatggccgatgttgatgatcctaaattgatgggatgggactatcctaagtgtgatagagctatgccctcaatgattcgtatgttgtcggctatgatcttaggttctaagcatgtcacatgttgtacggctagtgataaattttatagacttagtaatgagcttgctcaagttttgaccgaggttgtttattcaaatggtgggttttattttaaacctggtggtacaacttctggtgatgcaactacagcctacgccaattctgtctttaatatatttcaggctgtaagttctaacattaattgcgttttgagcgttaactcgtcaaattgcaataattttaatgttaagaagttacagagacaactttatgataattgctatagaaatagtaatgttgatgaatcttttgtggatgacttttatggttatttgcaaaagcatttttctatgatgattctttctgatgatagtgttgtgtgctataataaaacttatgctggacttggttacattgctgatattagtgcttttaaagccactttgtattatcagaatggtgtgtttatgagtacagctaagtgttggactgaggaagatctttctataggacctcatgaattttgctcacagcacactatgcagattgtagatgaaaatggtaagtattatctaccatatccagatcctagccgtattatttctgctggtgtttttgtggatgacatcactaagactgatgctgtcattcttttggaacgctatgtttctctggctatagatgcctacccattgtctaagcatcctaaacctgagtacaggaaggtgttttacgcattgttagactgggtcaaacatctcaacaagactcttaacgaaggtgttttggagtctttttctgttacacttttagatgaacatgagtctaagttttgggatgaaagcttttatgctagtatgtatgagaagtctacagtattacaagctgctggtctttgtgtagtatgtggttctcaaacagttctaagatgcggtgattgtttacgcagaccgatgttgtgcactaagtgcgcctatgatcatgtgtttggcactgatcataagttcattttagctattacaccatatgtgtgtaacacatctggctgcaatgtaaatgacgttacaaaactgtatcttggaggtttgaattattactgtgtagaccacaaaccacatctttcattcccactgtgttcagctggtaatgtctttggtttgtacaaaagttctgctttgggttccatggacattgatgtctttaacaaactttctacctctgattggtctgacattcgcgactacaagcttgctaatgatgcaaaagagtcactaaggttgtttgcagctgaaacggtcaaggctaaagaggaaagtgttaagtcatcatacgcttatgctaccctaaaggagattgtaggtcctaaggaacttttgctcttatgggaaagtggaaaagccaaaccaccgttaaaccgtaattctgtttttacatgcttccaaattacaaaagactccaagtttcaagttggtgagtttgtgtttgagaaagtagattacggttctgatacggttacttacaaatccactgctactactaagttagtaccaggtatgttgtttattttgacttctcataatgttgctccacttagagcgccaacaatggcaaaccaggagaaatattctaccatttacaagttgcacccatcatttaatgttagtgatgcttatgcaaatcttgtaccttattaccaacttattggcaaacagcgtataaccacaatacagggtcctcctggtagtggaaaatcgcattgttctattggtattggtgtgtattaccctggagcgaggatcgtgttcaccgcttgttctcacgctgctgttgattcgctctgtgcaaaagctgtcacagcctatagtgttgataagtgtacacgtattattcctgcacgtgccagagttgagtgttatagtggttttaaacctaacaataatagtgcacaatacgtgtttagtactgttaatgcgttacctgaagttaatgcagacattgttgtcgtggatgaggtgtctatgtgcactaactatgacttgtctgtgattaaccagcgtatatcatataaacacattgtatatgttggtgatcctcaacagcttccagctcctagagttcttatctctaaaggtgttatggaaccaattgactataatgttgtgacacaacgtatgtgtgctataggacccgatgtctttttacacaagtgttacagatgtcctgctgaaatagttaacactgtttcagagcttgtttatgaaaacaagtttgtacctgtcaaagaagctagtaagcagtgcttcaaaatctttgaacgcggtagtgttcaggtagacaatggctccagtataaataggcgtcaacttgatgttgttaagcgatttatacataaaaactccacatggagcaaggctgtgtttatctcaccttacaatagtcaaaattatgtagctgccaggcttttaggcttacaaactcagacagtggattctgctcaaggtagtgaatatgactatgttatattcgcacagacatcagatactgctcatgcctgtaatgccaatcgttttaacgttgccattactagagcaaagaaaggtattttctgtattatgtctgacagaactttgtttgatgcacttaagttctttgaaatcactatgacagatttacagtctgaaagtagttgtggtttgtttaaggattgtgcacgtaaccctattgatttaccaccaagtcatgccactacttatttgtcattgtctgatagatttaagactagtggtgacttggctgttcaaataggtaacaacaatgtttgtacctatgaacatgtgatttcatatatgggtttcaggtttgatgttagcatgcctggtagtcatagtttgttctgtactagagactttgccatgcgtcatgtcagaggttggttaggaatggatgtggaaggtgcacatgtcacaggtgacaatgttggcactaatgtacctctacaagttggtttttccaatggtgttgattttgtagctcaacctgaaggttgtgttctaacaaacactggcagtgttgtaaaacctgttcgtgctcgtgcaccacctggagaacaattcactcacattgtacctctgttacgcaagggacaaccttggagtgtgttgagaaaacgtattgttcaaatgatagcagattttcttgctggctcatctgatgtactggtgtttgtactttgggctggcggtttagagttgaccactatgcgttattttgttaagattggagctgttaaacattgccaatgtggtactgttgcaacatgctacaattctgttagtaatgactattgttgctttaaacatgcattgggctgtgactatgtttataatccatatgtcatagatattcaacaatggggttatgttggttcactctccactaatcaccatgcaatttgtaatgttcatagaaatgagcatgttgcttctggtgatgctattatgactagatgtttggctgtgtatgactgctttgttaagaatgtggattggtcaattacctaccctatgatagctaatgaaaatgccataaacaagggcggtcgcactgtgcagagtcatattatgcgtgctgctattaaattgtacaaccctaaagcaatccatgacattggtaatcctaagggtattcgttgtgctgtaactgatgccaagtggtattgttatgacaagaaccctattaattctaatgtgaaaacattggagtatgattacatgacacatggccaaatggatggcttgtgtttgttttggaattgtaatgtggatatgtaccctgaattctcaattgtttgcaggtttgacacacgtacacgatctacattgaaccttgaaggtgtaaatggtgggtcattgtatgtcaataatcatgcatttcacactcctgcttatgataaacgtgctatggctaaattgaaaccagcaccgtttttctactatgacgacggttcatgtgaggttgttcacgatcaagttaactatgttcctttgagagccactaattgcattaccaagtgtaatattggtggtgctgtatgttctaagcacgctaatctctatagagcatatgttgagtcatataacatttttactcaagctggttttaatatttgggttcctaccacgtttgattgttataatttgtggcagacattcacagaggtcaatttacaaggtttagagaacattgcttttaacgttgttaataaaggttcatttgttggtgctgatggtgaattaccagtagccattagtggtgataaagtgttcgtacgtgatggtaacactgataatttagtctttgttaacaaaacatcactgcctacaaacatagcatttgaactttttgctaagaggaaggttggtttaacaccacctctcagtattctcaaaaaccttggtgttgtcgccacatataagtttgtcttgtgggattatgaagctgagcgtcccttgacaagctttactaagtctgtttgtggttatacagactttgcagaggatgtttgtacttgttacgataatagtatacaaggttcatacgaacgttttactctgtcaactaatgctgtgttattctctgctactgctgtgaaaacaggtggtaagagtttgccggctattaaattgaattttggaatgcttaatggtaatgcaattgctactgtcaaatcagaagatggtaacataaaaaatattaactggtttgtttacgtacgcaaagatggcaaacctgttgatcattatgatggtttttatacccaaggtcgtaatttacaagactttttgcctcgcagcacaatggaagaagactttttgaacatggatataggcgtgtttattcaaaagtatggtctagaggatttcaacttcgagcacgttgtgtatggtgatgtttcaaaaactactctaggcggtttacacttgttgatttcacaagtacgtctgagtaaaatgggcatcttaaaggcagaggagtttgtggcagcatctgacataacactcaaatgttgtactgtgacttatcttaatgatcctagttctaagactgtttgtacttacatggatttgttgttggatgattttgtttctgtattgaagtctttggatttgactgttgtatccaaggttcatgaggtcataattgacaacaaaccatggagatggatgctatggtgtaaagataatgccgttgctacattctatcctcagttgcagagtgcagaatggaaatgcgggtattctatgcctggtatttataagacacaacgtatgtgcttagaaccatgtaatttgtataattatggtgcaggtttgaagttgcccagtggcattatgttcaatgttgttaaatacactcaattgtgtcaatattttaacagtaccacgttatgtgttcctcataatatgagagtgttacacttgggtgctggctctgattatggtgttgcaccaggaactgctgttcttaaaaggtggttgccgcacgacgcaattgttgttgacaacgatgttgttgactatgtgagtgacgctgattttagtgttactggtgattgtgcaaccgtttatttggaagacaagtttgacttgttaatctctgatatgtacgatggtaggacaaaggcaattgatggtgaaaatgtttcgaaagaaggatttttcacttacatcaatggtttcatttgtgaaaaacttgccatcggaggttcgattgctattaaagtaacagagtatagctggaataagaaattgtatgaacttgtacaaagattttctttttggactatgttttgcacttctgttaatacgtcatcatcagaagcctttgttgtcggaattaactatcttggtgatttcgcacaaggaccttttatagatggtaacataatacacgcaaattatgtattttggcgtaactccactgttatgagtttgtcctacaactctgttttagacctgagtaaatttaattgcaaacacaaagcgactgttgttgtgcaattaaaggatagtgatattaatgaaatggtgcttagtcttgttaggagtggtaagttgcttgtaaggggtaatggcaagtgtttgagttttagtaatcatttagtctcaactaaataaaatgtttgttttgcttgttgcatatgccttgttgcatattgctggttgtcaaactacaaatgggctgaacactagttactctgtttgcaacggctgtgttggttattcagaaaatgtatttgctgttgagagtggtggttatataccctccgactttgcattcaataattggttccttctaactaatacctcatctgttgtagatggtgttgtgaggagttttcagcctttgttgcttaattgcttatggtctgtttctggcttgcggtttactactggttttgtctattttaatggtactgggagaggtgattgtaaaggtttttcctcagatgttttgtctgatgtcatacgttacaacctcaattttgaagaaaaccttagacgtggaaccattttgtttaaaacatcttatggtgttgttgtgttttattgtaccaacaacactttagtttcaggtgatgctcacataccatttggtacagttttgggcaatttttattgctttgtaaatactactattggcaatgaaactacgtctgcttttgtgggtgcactacctaagacagttcgtgagtttgttatttcacgcacaggacatttttatattaatggctatcgctatttcactttaggtaatgtagaagccgttaatttcaatgtcactactgcagaaaccactgatttttgtactgttgcgttagcttcttatgctgacgttttggttaatgtgtcacaaacctctattgctaatataatttattgcaactctgttattaacagactgagatgtgaccagttgtcctttgatgtaccagatggtttttattctacaagccctattcaatccgttgagctacctgtgtctattgtgtcgctacctgtttatcataaacatacgtttattgtgttgtacgttgacttcaaacctcagagtggcggtggcaagtgctttaactgttatcctgctggtgttaatattacactggccaattttaatgaaactaaagggcctttgtgtgttgacacatcacacttcactaccaaatacgttgctgtttatgccaatgttggtaggtggagtgctagtattaacacgggaaattgccctttttcttttggcaaagttaataactttgttaaatttggcagtgtatgtttttcgctaaaggatatacccggtggttgcgcaatgcctatagtggctaattgggcttatagtaagtactatactataggctcattgtatgtttcttggagtgatggtgatggaattactggcgtcccacaacctgttgagggtgttagttcctttatgaatgttacattggacaaatgtactaaatataatatttatgatgtatctggtgtgggtgttattcgcgttagcaatgacacctttcttaatggaattacgtacacatcaacttcaggtaaccttctgggttttaaagatgttactaagggcaccatctactctatcactccttgtaacccaccagatcagcttgttgtttatcagcaagctgttgttggtgctatgttgtctgaaaattttactagttacggcttttctaatgttgtagaactgccgaaatttttctatgcgtccaatggcacttataattgcacagacgctgttttaacttattctagttttggcgtttgtgcagatggttctataattgctgttcaaccacgtaatgtttcatatgatagtgtttcagctatcgtcacagctaatttgtctataccttccaattggaccacttcggtccaggttgagtatttacaaattacaagtacacctatcgtagttgattgctccacttatgtttgcaatggtaatgtgcgctgtgttgaattgcttaagcagtatacttctgcttgtaaaactattgaagacgccttaagaaatagcgccaggctggagtctgcagatgttagtgagatgctcacttttgacaagaaagcgtttacacttgctaatgttagtagttttggtgactacaaccttagcagcgtcatacctagcttgcccacaagtggtagtagagtggctggtcgcagtgccatagaagacatactttttagcaaacttgttacttctggacttggcactgtggacgcagactacaaaaagtgcactaagggtctttccattgctgacttggcttgtgctcaatattataatggcattatggttttgcctggcgtcgctgatgctgaacgaatggccatgtatacaggttctttaattggtggaattgctttaggaggtctaacatcagccgtttcaataccattttcattagcaattcaggcacgtttaaattatgttgcattgcagactgatgttttacaagaaaatcagaaaattcttgctgcatcttttaacaaagcaatgaccaacatagtagatgcctttactggtgttaatgatgctattacacaaacttcacaagccctacaaacagttgctactgcacttaacaagatccaggatgttgttaatcaacaaggcaactcattgaaccatttaacttctcagttgaggcagaattttcaagctatctctagctctattcaggctatctatgacagacttgacactattcaggctgatcaacaagtagataggctgattactggtagattggctgctttgaatgtattcgtttctcatacattgactaagtacactgaagttcgtgcttccagacagcttgcacaacaaaaagtgaatgagtgtgtcaaatcccagtctaagcgttatggcttctgtggaaatggcactcacattttctcaattgttaatgctgctcctgaggggcttgtttttctccacactgtcttgttgccgacacaatataaggatgttgaagcgtggtctgggttgtgcgttgatggtacaaacggttatgtgttgcgacaacctaatcttgctctttacaaagaaggcaattattatagaatcacatctcgcataatgtttgaaccacgtattcctaccatggcagattttgttcaaattgaaaattgcaatgtcacatttgttaacatttctcgctctgagttgcaaaccattgtgccagagtatattgatgttaataagacgctgcaagaattaagttacaaattgccaaattacactgttccagacctagttgtcgaacagtacaaccagactattttgaatttgaccagtgaaattagcacccttgaaaataaatctgcggagcttaattacactgttcaaaaattgcaaactctgattgacaacataaatagcacattagtcgacttaaagtggctcaaccgggttgagacttacatcaagtggccgtggtgggtgtggttgtgcatttcagtcgtgctcatctttgtggtgagtatgttgctattatgttgttgttctactggttgctgtggcttctttagttgttttgcatcttctattagaggttgttgtgaatcaactaaacttccttattacgacgttgaaaagatccacatacagtaatggctctaggtttgttcacattgcaacttgtgtctgctgttaatcaatcgcttagcaatgcgaaagttagtgctgaagtttcacgacaggttatccaagacgtgaaagatggcactgttaccttcaacttgctagcgtatacactaatgagcctctttgttgtgtattttgctttatttaaagcaagatcacaccgtggcagagctgctcttatagtgtttaaaattctaatccttttcgtttatgtgccattgctgtattggtctcaagcatatatttacgcaactttgattgctgtaattttgcttggaagatttttccatacagcttggcactgctggctctacaagacatgggatttcattgtcttcaatgtaaccacactttgctatgcaaggtaagtgttggtttcttgaaaataaggctctgaaaccattcgtttgtttttacggaggggatcaattcctttacataggcgacagaattgtttcttatttctcaactaacgacttgtacgttgctcttagaggacgtattgataaagacctcagcctttctagaaaggttgagttatataacggtgaatgtgtatacttgttttgtgaacacccagctgttggaatagtcaacacagatttcaaattagaaatccactaagatgttccttaagctagtggatgatcatgctttggttgttaatgtactactctggtgtgtggtgcttatagtgatactactagtgtgtattacaataattaaactaattaagctttgtttcacttgccatatgttttgtaatagaacagtttatggccccattaaaaatgtgtaccacatttaccaatcatatatgcacatagaccctttccctaaacgagttattgatttctaaactaaacgacaatgtcaaatgacaattgtacgggtgacattgtcacccatttgaagaattggaattttggttggaatgttattctaaccatattcattgttattcttcagtttggacactataaatactccagattgttttatggtttgaagatgcttgtactgtggcttctttggccactcgtacttgctttgtcaatctttgacacctgggctaattgggattctaattgggcctttgttgcatttagcttttttatggccgtatcaacactcgttatgtgggtgatgtacttcgcaaacagtttcagacttttccgacgtgctcgaactttttgggcatggaatcctgaggttaatgcaatcactgtcacaaccgtgttgggacagacatactatcaacccattcaacaagctccaacaggcattactgtgaccttgctgagcggcgtgctttacgttgacggacatagattggcttcaggtgttcaggttcataacctacctgaatacatgacagttgccgtgccgagcactactataatttatagtagagtcggaaggtccgtaaattcacaaaatagcacaggctgggttttctacgtacgagtaaaacacggtgatttttctgcagtgagctctcccatgagcaacatgacagaaaacgaaagattgcttcattttttctaaactgaacgaaaagatggctacagtcaaatgggctgatgcatctgaaccacaacgtggtcgtcagggtagaataccttattctctttatagccctttgcttgttgatagtgaacaaccttggaaggtgatacctcgtaatttggtacccatcaacaagaaagacaaaaataagcttataggctattggaatgttcaaaaacgtttcagaactagaaagggcaaacgggtggatttgtcacccaagctgcatttttattatcttggcacaggaccccataaagatgcaaaatttagagagcgtgttgaaggtgtcgtctgggttgctgttgatggtgctaaaactgaacctacaggttacggtgttaggcgcaagaattcagaaccagagataccacacttcaatcaaaagctcccaaatggtgttactgttgttgaagaacctgactcccgtgctccttcccggtctcagtcgaggtcgcagagtcgcggtcgtggtgaatccaaacctcaatctcggaatccttcaagtgacagaaaccataacagtcaggatgacatcatgaaggcagttgctgcggctcttaaatctttaggttttgacaagcctcaggaaaaagataaaaagtcagcgaaaacgggtactcctaagccttctcgtaatcagagtcctgcttcttctcaaacttctgccaagagtcttgctcgttctcagagttctgaaacaaaagaacaaaagcatgaaatgcaaaagccacggtggaaaagacagcctaatgatgatgtgacatctaatgtcacacaatgttttggccccagagaccttgaccacaactttggaagtgcaggtgttgtggccaatggtgttaaagctaaaggctatccacaatttgctgagcttgtgccgtcaacagctgctatgctgtttgatagtcacattgtttccaaagagtcaggcaacactgtggtcttgactttcactactagagtgactgtgcccaaagaccatccacacttgggtaagtttcttgaggagttaaatgcattcactagagaaatgcaacaacatcctcttcttaaccctagtgcactagaattcaacccatctcaaacttcacctgcaactgctgaaccagtgcgtgatgaagtttctattgaaactgacataattgatgaagtaaactaaacatgccactgtgttgtttgaaattcaggctttagttggaattttgcttttgttctttcttttattatctttcttttgcctgtttttagagagatttggcgccttggtgccgtagatgaatacattgcttttctctgatctatgtatgatggtacgatcagagctgcttttaattaacatgatcccttgctttggcttgacaaggatctagtcttatacacaatggtaagccagtggtagtaaaggtataagaaatttgctactatgttactgaacctaggtgaacgctagtataactcattacaaatgtgctggagtaatcaaagatcgcattgacgagccaacaatggaagagccagtcatttgtcttgagacctatctagttagtaactgctaatggaacggtttcgatatggatacacaaaaaaaaaaaaaaaaaaaaaaaaaaaaaaaaaaaaaaaa

SEQ ID NO: 30057 - DNA, 28033 bp, Porcine epidemic diarrhea virus
  misc_structure (12614)...(12696): Frameshift Site
  misc_structure (12614)...(12620): Slippery Site
  misc_structure (12627)...(12696): Pseudoknot
  misc_structure (12627)...(12636): Stem 1 up
  misc_structure (12640)...(12644): Stem 2 down
  misc_structure (12647)...(12656): Stem 1 down
  misc_structure (126871)...(12691): Stem 2 up
acttaaaaagattttctatctacggatagttagctctttttctagaccttgtctactcaattcaactaaacagaaattttgtccttccttccggccgcatgttcatgctgctggaagctggcgtggaatttcattaggtttgcttaagtagccatcgcaagtgctgtgctgtcctctagttcctggttggcgttccgtcgccttctacatactagacaaacagccttcctccggttccgtctgggggttgtgtggataactagttccgtctagtttgaaaccagtaactgccggctatggctagcaaccatgtcacattggcgtttgccaatgatgcagaaatttcggcttttggcttttgcactgctagtgaagccgtctcatactattctgaggccgccgctagtggatttatgcaatgccgttttgtgtccctcgatctcgctgacactgttgagggattgcttcctgaagactatgtcatggtggtgatcggcactaccaagcttagtgcgtatgtggacacttttggtagccgccccagaaacatttgtggttggctgttattttctaactgtaattacttcctcgaagagttagagctcacttttggtcgtcgtggtggtaacatcgtgccagttgaccaatacatgtgtggcgctgacgggaaacctgttcttcaggaatccgagtgggagtatacagatttcttcgctgactccgaagacggtcaactcaacattgctgggatcacttatgtgaaggcctggattgtagagcgatcggacgtctcttatgcgagtcagaatttaacatctattaagtctattacttactgttcaacctatgagcatacttttcttgatggtactgccatgaaggttgcacgtactccaaagatcaagaagaatgttgttttgtctgagccacttgctactatctacagggaaattggttccccttttgtggataatgggagcgatgctcgttctatcattaggagaccagtgttcctccacgcttttgttaagtgtaagtgtggtagttatcattggactgttggtgattggacttcctatgtctccacttgctgtggctttaagtgcaagccagtccttgtggcctcatgctctgctatgcctggttctgttgtggtcacacgcgctggtgctggcactggtgttaagtactacaacaacatgttcctgcgccatgtggctgacattgatggattggcattctggcgaattcttaaggtgcagtccaaagacgacctcgcttgctctggtaagttccttgaacaccatgaggaaggtttcacagacccttgctactttttgaatgattcgagccttgctactaagcttaagttcgacatccttagtggcaagttttctgatgaagtcaaacaagctatcattgctggtcatgttgttgttggcagtgcactcgttgacattgttgacgatgcactgggacaaccttggttcatacgtaagcttggtgaccttgcaagtgcaccttgggagcagcttaaggctgtcgttagaggccttggcctcttgtctgatgaggttgtgctctttggcaaaagacttagctgtgccactcttagtatcgttaacggcgtttttgagtttctcgccgatgtgccagagaagttggctgcggctgttacagtttttgtcaacttcttgaatgagttctttgagtctgcctgtgactgcttaaaggtcggaggtaagacattcaacaaggttggttcctatgttctttttgacaatgcattggttaagcttgtcaaggcaaaagctcgcggcccacgacaggcaggtatttgtgaagttcgctacacaagcctggttgttgggagtactaccaaggtggtttccaagcgcgttgaaaatgccaatgtgaatctcgtcgtcgttgacgaggatgtaaccctcaacaccactggtcgtacagttgtcgttgatggacttgcattcttcgagagtgacgggttttacagacatcttgctgatgctgacgttgtcatcgaacatcctgtttataagtctgcttgtgagctcaagccagtttttgagtgtgacccaatacctgattttcctttgcctgtggccgctagtgttgcagagctctgtgtgcaaaccgatctgttgcttaaaaattacaacactccttataaaacttacagctgcgtagtgagaggtgataagtgttgcatcacttgcaccttacagttcaaagcaccaagttatgtggaggatgctgttaattttgtagacctatgtaccaagaacattggtactgctggttttcatgagttttacataacggcccatgaacaacaggatctgcaagggtttttaaccacttgttgcacgatgtcaggttttgagtgttttatgcctacaatcccacagtgtccagcagtgcttgaagagattgatggtggtagcatatggcggtcttttatcactggtcttaatacaatgtgggatttttgcaagcgtcttaaagtcagctttggactggatggcattgttgtcactgtagcacgcaaatttaaacgacttggtgctcttttggcagaaatgtataacacttatctttcaactgtggtggaaaacttggtactggccggtgttagcttcaagtattatgccaccagtgtcccaaaaattgttttgggcggttgttttcacagtgttaaaagtgtttttgcaagtgtcttccagattcctgtccaggcaggcattgagaagtttaaagttttccttaactgtgttcaccctgttgtaccacgtgtcattgaaacttcttttgtggaattagaagagacgacatttaaaccaccagcactcaatggtggtattgctattgttgatggcttcgctttctattatgatggaacactatactatcccaccgatggtaatagtgttgtgcctatctgttttaagaagaaaggtggtggtgatgttaaattctctgatgaagtctctgttaaaaccattgatccagtttataaggtctcccttgaatttgagttcgagtctgagactattatggctgtgcttaataaggctgttggtaatcgtatcaaggttacaggtggttgggatgatgtcgttgagtatattaacgttgccattgaggttcttaaagatcacgttgaagtgcctaagtactacatctatgatgaggaaggtggcactgatcctaatctgcccgtaatggtttctcagtggccgttgaatgatgacacgatctcacaggacctgcttgatgtggaagttgttacggatgcaccaattgattccgagggtgatgaagtagactcctctgcacctgagaaggtggcagatgtggctaactctgaacctggggatgatggtcttcctgtggcacctgaaacaaatgtagagtctgaagttgaggaagttgccgcaaccttgtcctttattaaagatacaccttccacagttactaaggacccttttgcttttgactttgtaagctacggaggacttaaagttttaagacaatctcataacaattgttgggttacttctaccttggtgcagctacaattgcttggcatcgttgatgaccctgcaatggaactttttagtgctggtagagttggtccaatggttcgcaaatgttatgagtcacaaaaggctattttgggatctttgggtgatgtgtcggcttgcctagagtctctgactaaggacctacacacacttaagattacctgttctgtagtctgcggttgtggtactggtgaacgtatctatgagggttgtgcttttcgtatgacgccaactttggaaccgtttccatatggtgcttgtgctcagtgtgctcaagttttgatgcacacttttaaaagtattgttggcaccggcatcttttgccgagatactactgctctctccttggattctttggttgtaaaacctctttgtgcggctgcttttataggcaaggatagtggtcattatgtcaccaatttttatgatgctgctatggctattgatggttatggtcgtcatcagataaagtatgacacactgaacaccatttgtgttaaagacgtgaattggacagcacctcttgtccctgccgttgattctgtagtggagcctgttgtcaaaccattctattcttataagaatgttgatttttaccaaggagattttagtgaccttgttaaacttccatgtgactttgttgttaatgctgcaaatgagaagttgtctcatggtggcggcatagcaaaggccattgatgtttataccaagggcatgttgcagaagtgttcaaatgattacattaaagcacacggtcccattaaagttggacgtggtgtcatgttggaggcattaggtcttaaggtctttaatgttgttggtccacgtaagggtaagcatgcacctgagcttcttgttaaggcttataagtccgtttttgctaactcaggtgttgctcttacacctttgattagtgttggaatttttagtgttcctttggaagaatctttatctgcttttcttgcatgtgttggtgatcgccactgtaagtgcttttgttatggtgacaaagagcgcgaggcgatcattaagtacatggatggcttggtagatgctattttcaaagaggcgcttgttgacactactcctgtccaggaagatgttcaacaagtttcacaaaaaccagttttgcctaattttgaacctttcaggattgaaggtgctcatgctttctatgagtgcaaccctgaaggtttgatgtccttaggtgctgacaagctggtgttgtttacaaattccaatttggatttttgtagtgttggtaagtgtcttaacgatgtgaccagcggtgcattgcttgaagccataaatgtatttaaaaagagtaacaaaacagtgcctgctggcaactgtgttactttagattgtgcaaatatgatttctattactatggtagtattgccatttgatggtgatgctaattatgacaaaaattatgcacgcgccgttgtcaaggtatctaagcttaaaggcaagttagtgcttgctgttgatgatgccacgttgtattccaagttgtcccacctcagcgtgttaggtttcgtgtccacacctgacgatgtggagcgtttctacgcaaataagagtgtggttattaaagtcactgaggatacacgtagtgtcaaggctgttaaagtagaatccactgctacttatggacaacaaattggaccttgtcttgttaatgacaccgttgtcacagacaacaaacctgttgtcgctgacgttgtagctaaggttgtaccaaatgctaattgggattcacattatggttttgataaggctggtgagttccacatgctagaccatactgggtttacctttcctagcgaagttgttaacggtaggcgtgtgattaaaaccacagataataattgttgggttaatgtcacatgtttacaattacagtttgctagatttaggttcaagtcagcaggtctacaggctatgtgggagtcctattgtactggtgatgttgctatgtttgtgcattggttgtactggcttactggtgttgacaaaggtcagcctagtgattcagaaaatgcacttaacatgttgtccaagtacattgttcctgctggttctgtcactattgaacgtgtcacgcatgacggctgttgttgtagtaagcgtgttgttactgcaccagttgtgaatgctagtgtgttgaagcttggcgtcgaggatggcctttgtccacatggtcttaactacattggcaaagttgttgtagttaaaggtactacaattgttgtcaatgtaggaaaacctgtagtggcaccatcacacctctttcttaagggtgtatcctacacaacattcctagataatggtaacggtgttgtcggccattatactgtttttgatcatggcactggtatggtgcatgatggcgatgcttttgtaccgggtgatcttaatgtatctcctgttacaaatgttgttgtctcagagcagacggctgttgtgattaaagaccctgtgaagaaagcagagttagacgctactaagctgctcgacactatgaattatgcatcggaaagatttttttcctttggtgatttcatgtcacgtaatttaattacagtgtttttgtacatccttagcattttgggtctctgttttagagcctttcgtaagagagatgttaaagttctagctggtgtaccccaacgtactggtattatattgcgtaaaagtatgcgctataatgcaaaggcgttgggtgtctttttcaagctaaagctttattggttcaaagttcttggtaagtttagtctgggtatttatgcattgtatgcattactattcatgacaatacgctttacacctataggtagccccgtctgtgatgatgttgttgctggttatgctaattctagttttgacaagaatgagtactgcaacagtgttatttgtaaggtctgtctctatgggtaccaggaactctcggacttctcccacacacaggttgtatggcaacaccttagagacccattaattggtaatgtgatgcctttcttttatttggcatttttggcaatttttgggggtgtctatgtaaaggctattactctctattttattttccagtaccttaatagtcttggtgtgtttttgggcctacagcagtccatttggtttttgcagctcgtgccttttgatgtctttggtgatgagatcgtcgtctttttcatcgttacacgcgtattgatgttcattaagcatgtttgccttggctgcgataaggcatcttgtgtggcttgctctaagagtgctcgccttaagcgcgttcctgtccagactatctttcagggtactagtaaatccttctacgtacatgccaatggtggttctaagttctgtaagaagcacaatttcttttgtttaaattgtgattcttatggtccaggctgcacttttattaacgacgtcattgcaactgaagttggtaatgttgtcaaacttaatgtgcaaccgacaggtcctgccactattcttattgacaaggttgaattcagtaatggtttctactatctttatagtggtgacacattttggaagtacaactttgacataacagatagcaaatacacttgcaaagaggcacttaaaaattgtagcataatcacagactttattgtttttaacaataatggttccaatgtaaatcaggttaagaatgcatgtgtgtatttttcacagatgctttgtaaacctgttaagttagtggactcagcgttgttggccagtttgtctgttgattttggtgcaagcttacatagtgcttttgttagtgtgttgtcgaatagtttcggcaaagacctgtcaagttgtaatgacatgcaggattgcaagagcacattgggttttgatgatgtaccattggatacctttaatgctgctgttgctgaggctcatcgctatgatgtcctcttgactgacatgtcattcaacaattttaccaccagttatgcaaaaccagaggaaaaatttcccgtccatgacattgccacgtgtatgcgtgtaggtgccaagattgttaatcataacgttcttgtcaaggatagtatacctgtggtgtggcttgtacgtgatttcattgccctttcggaagaaactaggaagtacattattcgtacgactaaagttaagggtataacatttatgttgacctttaatgattgtcgtatgcatactaccatacctactgtttgcattgcaaataagaagggtgcaggtcttcctagtttttcaaaggttaagaaattcttttggtttttgtgtctgttcatagttgctgctttctttgcactaagctttcttgattttagtactcaggttagcagtgatagcgattatgatttcaagtatattgagagtggccagttgaagacttttgacaatccacttagttgtgtgcataatgtctttattaacttcgaccagtggcatgatgccaagtttggtttcacccccgtcaacaatcctagttgtcctatagttgttggtgtatcagacgaagctcgcactgttccaggtatcccagcaggtgtttatttagctggtaaaacacttgtgtttgctattaacaccatttttggtacatctggtttgtgcttcgatgctagtggcgttgctgataagggcgcttgcatttttaattcagcttgcaccacattatctggtttgggtggaactgctgtctactgttacaagaatgggctagttgaaggtgccaaactttatagtgagttggcacctcatagctactataaaatggtagatggtaatgctgtgtctttacctgaaattatttcacgcggctttggcatccgtactatccgtacaaaggctatgacttattgccgtgttggccagtgtgtgcagtctgcagaaggcgtttgttttggcgccgatagattctttgtctataatgcagaatctggttctgactttgtttgtggcacagggctcttcacattgttgatgaacgttattagtgttttttccaagacagtaccagtaactgtgttgtctggtcaaatactttttaattgcattattgcttttgttgctgttgcggtgtgtttcttatttacaaagtttaagcgcatgttcggtgatatgtctgttggcgttttcactgtcggtgcttgtactttgttgaacaatgtttcttacattgtaacacagaacacacttggcatgttgggctatgcaactttgtatttcttgtgcactaagggtgttagatatatgtggatttggcacttgggatttttgatctcatatattcttattgcaccatggtgggttttgatggtttatgccttttcagccatttttgagtttatgcctaacctttttaagcttaaggtttcaacacaactttttgagggcgacaagttcgtaggctcttttgaaaatgctgcagcaggtacatttgtgcttgatatgcatgcctatgagagacttgccaactctatctcaactgaaaaactgcgtcagtatgctagtacttacaataagtacaagtattattcaggcagtgcttcagaggctgattacaggcttgcttgttttgcccatttggccaaggctatgatggattatgcttctaatcataacgatacgttatacacaccacccactgtgagttacaattcaactctacaggctggcttgcgtaagatggcacaaccttctggtgttgttgagaagtgcatagtccgtgtttgctatggtaatatggctcttaatggcctatggcttggcgatattgttatgtgcccacgccatgttatagcgtctagtactactagcactatagattatgattatgccctttctgttttacgcctccacaacttctccatttcatctgggaatgttttcctaggtgttgtgagtgcaactatgcgaggtgctttgttgcagataaaggttaatcaaaacaatgtccacacgcctaagtacacctatcgcacagttagaccgggtgaatcttttaatattttggcgtgctatgatggtgctgcagctggtgtttacggcgttaacatgcgctctaattacactattagaggctcgttcattaatggcgcttgtggttcacctggttataatattaacaatggtaccgttgagttttgctatttacaccagcttgaacttggttcaggctgtcatgttggtagcgacttagatggtgttatgtatggtggttatgaggaccaacctactttgcaagttgaaggcgctagtagtctgtttacagagaatgtgttggcatttctttatgcagcactcattaatggttctacctggtggcttagttcttctaggatcgctgtagacaggtttaatgagtgggctgttcataatggtatgacaacagtgggcaatactgattgcttttctattcttgctgctaagactggagttgatgtacaacgtttgttggcctcaatccagtctctgcataagaattttggtggaaagcaaattcttggccatacctcgttgacagatgagtttactacaggtgaagttgtacgtcaaatgtatggcgttaatcttcagggtggctatgtgtcacgcgcctgcagaaatgtcttgctggttggttcttttctgactttcttttggtcagaattagtttcctacactaagttcttctgggtaaatcctggttatgttacacctatgtttgcgtgcttgtcattgctatcctcacttttgatgttcacactcaagcataagacattgtttttccaggtcttcttaatacctgctctgattgttacatcttgcattaatttggcatttgatgttgaagtctacaactatttggcagagcattttgattaccatgtttctcttatgggttttaatgcacaaggtcttgttaacatctttgtctgctttgttgttaccattttacacggcacatacacatggcgcttctttaatacacctgcgagttctgtcacttatgtggtagctttgctgactgcggcctataactatttttacgctagtgacattcttagttgtgctatgacactatttgctagtgtgactggcaactggttcgttggtgctgtttgttataaagttgctgtgtatatggccttgagatttcctacgttcgtggctatttttggtgatattaagagtgttatgttctgttaccttgtgttgggttattttacctgttgcttctacggtattctctactggttcaacaggttctttaaggttagtgtaggtgtctatgactatactgttagtgctgctgagtttaagtatatggttgctaatggcctacgtgcaccaactggaacacttgattcactactgttgtccgccaaattgattggtattggtggtgagcggaatattaagatttcttccgttcagtctaaactgactgatattaagtgtagtaacgttgtgcttttaggctgtctttctagcatgaatgtttcagcaaattcaacagaatgggcttattgtgttgacttgcataacaagatcaacttgtgtaatgacccagaaaaagcgcaggaaatgctacttgctttgttggcatttttccttagtaagaatagtgcctttggtttagacgacttattggaatcttattttaatgacaatagtatgttgcagagtgttgcatctacttatgtaggtttgccttcctatgtcatttatgaaaatgcacgccaacagtatgaagatgctgttaataatggttctccacctcagttggttaagcaattgcgccatgctatgaatgtagcaaagagcgaatttgaccgtgaggcttctactcagcgtaagcttgatagaatggcggaacaggctgcagcacagatgtataaagaggcaagggcagttaataggaagtccaaagttgtaagtgctatgcattcactgctttttggtatgttgagacgtttggatatgtcttctgtagacaccattctcaacttggcaaaggatggggtggtacctctgtctgtcataccggcagtcagtgctactaagcttaacattgttacctctgatatcgattcttataatcgtatccagcgtgagggatgtgtccactacgctggtaccatttggaatataattgatatcaaggacaatgatggcaaggtggtacacgttaaggaggtaaccgcacagaatgctgagtccctgtcatggcccctggtccttgggtgtgagcgtattgttaagctccagaataatgagattattcctggtaagctgaagcagcgctccattaaggcagaaggagatggcatagttggagaaggtaaggcactttacaataatgagggtggacgtacttttatgtatgctttcatttcagataaaccggacctgcgtgtagttaagtgggagttcgatggtggttgtaacactattgagctagaaccaccacgtaagttcttggtggattctcctaatggtgcacagatcaagtatctctactttgttcgtaaccttaacacgttgcgtaggggtgctgttcttggctacataggtgccactgtacgcttgcaggctggtaaacaaacagaacaggctattaactcttcattgttgacactttgcgctttcgctgtggatcctgctaagacctacatcgatgctgttaaaagtggtcacaaaccagtaggtaactgtgttaagatgttggccaatggttctggtaatggacaagctgttactaatggtgtggaggctagtactaaccaggattcatatggtggtgcttccgtgtgtctatattgtagagcacatgttgagcatccatctatggatggtttttgcagactgaaaggcaagtatgtacaggtgccactaggtacagtggatcctatacgttttgtacttgagaatgacgtttgcaaggtttgtggttgttggctgtctaatggctgcacttgtgacagatccattatgcaaagcactgatatggcttatttaaacgagtacggggctctagtgcagctcgactagagccctgtaatggtactgatacacaacatgtgtatcgtgcttttgacatctacaacaaggatgttgcttgtctaggtaaattcctcaaggtgaactgtgttcgcctgaagaatttggataagcatgatgcattctatgttgtcaaaagatgtaccaagtctgcgatggaacacgagcaatccatctatagcagacttgaaaagtgtggggccatagccgaacacgatttcttcacttggaaggatggtcgtgcaatctatggtaacgtttgtagaaaggatcttaccgagtatactatgatggatctgtgttacgctttacgtaactttgatgaaaacaattgcgatgttcttaagagcattttgattaaggtaggtgcttgtgaggagtcctactttaataataaagtctggtttgaccctgttgaaaatgaagacattcatcgtgtctatgcattgttaggtaccattgttgcacgtgctatgcttaaatgcgttaagttctgtgatgcaatggttgaacaaggtatagttggtgttgtcacattagataatcaggatcttaatggtgatttttatgattttggtgattttacttgtagtatcaagggaatgggtgtacccatttgcacatcatattactcttatatgatgcctgttatgggtatgactaattgccttgctagtgagtgttttgttaagagtgatatatttggtgaggattttaagtcatatgacctgctggaatatgatttcacggagcataagacagcactcttcaacaagtatttcaagtattggggactgcaataccaccctaactgtgtggactgcagtgatgagcagtgcatagttcactgtgccaacttcaatacgttgttttccactaccatacctattacggcatttggacctttgtgtcgcaagtgctggattgatggtgttccactggtaactacagctggttatcattttaaacagttaggtatagtttggaataatgacctcaacttacactctagcaggctctctattaatgaattactccagttttgtagtgatcctgcactgcttatagcatcatcaccagcccttgttgaccagcgtactgtttgcttttcagttgcagcgctaggtacaggtatgactaaccagactgtgaaacctggccatttcaataaggagttttatgacttcttacttgagcaaggtttcttctctgagggctctgagcttactttaaagcacttcttctttgcacagaaggttgatgcagctgttaaggattttgactactataggtataatagacccactgttctggacatctgccaagctcgcgtcgtgtatcaaatagtgcaacgctattttgatatttacgagggtggttgtatcactgctaaagaagtggttgttacaaaccttaacaagagcgcaggctatcctttgaacaagtttggtaaagctggtctttactatgagtctttatcctatgaggaacaggatgaactttatgcttatactaagcgtaacatcctgcccactatgacacagctcaaccttaaatacgctattagtggcaaagaacgtgcacgcacagtgggtggtgtctcgcttttgtcaaccatgaccactcggcagtatcatcagaaacaccttaaatccatagttaatactaggggcgcttcggttgttattggtactactaagttttatggtggttgggacaatatgcttaagaaccttattgatggtgttgaaaatccgtgtcttatgggttgggattacccaaagtgcgatagagcactgcccaatatgatacgcatgatttcagccatgatcttaggctctaagcacaccacatgctgcagttctactgaccgctttttcaggttgtgcaatgaattggctcaagtccttactgaggttgtttattctaatggagggttttatttgaagccaggtggtactacctctggtgatgcaaccaccgcatatgcaaactcagttttcaatatcttccaagcagtaagtgccaatgttaacaaacttcttagtgttgacagcaatgtctgtcataacttagaagttaagcaattacaacgtaagctctatgagtgctgttatagatcgactatcgtcgatgaccagttcgtcgttgagtattatggttacttgcgtaaacatttttcaatgatgattctttctgatgatggcgttgtttgttataacaatgactatgcatcacttggttatgtcgcggatcttaacgcattcaaggctgttttgtattaccagaacaacgtcttcatgagcgcctctaaatgttggatcgagcctgacattaataaaggtcctcatgaattttgttcgcagcatactatgcagattgtcgataaggagggtacttattaccttccttaccctgatccttcaagaatcctctctgcaggtgtgtttgttgatgacgttgttaaaactgatgcagttgtattgcttgaacgttatgtgtcattggctatagatgcctacccgttatctaagcatgaaaaccctgaatataagaaggtgttttatgtgcttttggattgggttaagcatctgtataaaactttgaatgctggtgtgttagagtctttttctgtcacacttttggaagattctactgctaaattctgggatgagagcttttatgccaacatgtatgagaaatctgcagttttacaatctgcagggctttgtgttgtttgtggctctcaaactgttttacgttgtggtgattgtctacggcgtcctatgctttgtactaagtgtgcttatgatcatgtcattggaacaactcacaagttcattttggccatcactccatatgtgtgttgtgcttcagattgtggtgtcaatgatgtaaccaagctctacttaggtggtcttagttactggtgtcatgaacacaagccacgtcttgcattcccgttgtgctctgctggtaatgtttttggcttatacaaaaattctgctaccggttcacccgatgttgaagactttaatcgcattgctacatccgattggactgatgtttctgactacaggttggcaaatgatgtcaaggactcattgcgtctatttgcagcggaaactatcaaggccaaggaggagagcgttaagtcatcctatgcttgtgcaacactacatgaggttgtaggacctaaagagttgttgctcaaatgggaagtcggcagacccaaaccacctcttaatagaaattcggttttcacttgttatcatataacgaagaacaccaaatttcaaatcggtgagtttgtgtttgagaaggcagaatatgataatgacgctgtaacatataaaactaccgccacaacaaaacttgttcctggcatggtttttgtgcttacctcacataatgttcagccattgcgtgcaccaaccattgctaatcaagaacgttattccactatacataagttgcatcctgcttttaacatacctgaagcttattctagcttagtgccctattaccaattgattggtaagcagaagattacaactatccagggaccccccggtagtggtaaatctcactgtgttatagggctaggtttgtactatccaggtgcacgtattgtgtttacagcttgttctcatgcagcggtcgattcactctgtgtgaaggcctccactgcttatagcaatgacaaatgttcacgcatcataccacagcgtgctcgtgttgagtgttatgatggtttcaagtctaataatactagtgctcagtaccttttctccactgtcaatgctttgccagagtgtaatgcggacattgttgtggtggatgaagtttctatgtgcactaattatgacttgtctgtcataaatcagcgcatcagctataggcatgtagtctatgttggtgaccctcaacagctgcctgcaccacgtgttatgatttcacgtggtactttggaaccaaaggactacaatgttgtcactcaacgtatgtgtgcccttaagcctgatgtcttcttgcacaagtgttatcgctgtcctgcagagatagtgcgcactgtgtctgagatggtctatgaaaaccaattcattcctgtgcaccctgacagcaagcagtgttttaagatcttttgcaagggtaatgtgcaggttgataacggttcaagtattaaccgcaggcaattggatgttgtgcgtatgtttttggctaaaaatcctaggtggtcaaaggctgttttcatttccccttataacagccagaattatgttgccagccgtttgctaggtttacaaattcagacagttgattcatcccagggtagtgagtatgactatgtcatttacgcacaaacctcagatactgcccatgccagtaatgttaacaggtttaatgttgccatcacaagggctaagaaaggcatattatgtataatgtgcgataggtccctttttgatctgcttaaattttttgagcttaaattgtctgatttgcaggctaatgagggttgtggtctttttaaagactgtagcagaggtgatgatttgttgccaccgtctcatgctaataccttcatgtctttagcggacaattttaagactgatcaatatcttgctgttcaaataggtgttaatggacccattaaatatgagcatgttatctcgtttatgggtttccgttttgatattaacatacccaaccaccacactctcttttgcacacgcgactttgccatgcgcaatgttagaggttggttgggttttgacgttgaaggagcacatgttgttggctctaacgtcggtacaaatgtcccattgcaattagggttttctaacggtgttgattttgttgtcagacctgaaggttgcgttgtaactgagtctggtgactacattaaacccgtcagagctcgtgctccaccaggggaacaattcgcacaccttttgcctttacttaaacgcggccaaccatgggatgtggttcgcaagcgtatagttcaaatgtgtagtgactacctggctaacctatcagacatactaatttttgtgttgtgggctggtggtttggagttgacaactatgcgttactttgtcaagattggaccaagcaagagttgtgattgtggtaaggttgctacttgttacaatagtgcgctgcatacgtactgttgtttcaaacatgcccttggttgtgattatctgtataacccatactgtattgatatacagcagtggggatacaagggatcacttagccttaaccaccatgagcattgtaatgtacatagaaacgagcatgtggcttctggtgatgccataatgactcgctgtctggccatacatgattgctttgtcaagaacgttgactggtccatcacatacccatttattggtaatgaggctgttattaataagagcggccgcattgtgcaatcacacactatgcgttcagttcttaagttatacaatccaaaagccatatatgatattggcaatcctaagggcattagatgcgccgtaacggatgctaagtggttctgctttgacaagaatcctactaattctaatgtcaagacattggagtatgactatataacacacggccaatttgatgggttgtgcttgttttggaattgcaatgtggacatgtatccagaattttctgtggtctgtcgttttgatactcgctgtaggtcaccactcaacttggagggttgtaatggtggttcactgtatgttaacaatcatgcattccacacaccggcttttgacaagcgtgcttttgctaagttgaagccaatgccatttttcttctatgatgatactgagtgtgacaagttacaggactccataaactatgttcctcttagggctagtaactgcattactaaatgtaatgttggtggagctgtttgtagtaagcattgtgctatgtatcatagctatgtcaatgcttacaacacctttacgtcagcgggctttacgatttgggtgcccacttcgtttgacacctataatctgtggcagacatttagtaacaatttgcaaggtcttgagaacattgctttcaatgttttaaagaaaggatcttttgttggtgatgaaggtgagcttcctgtagctgtggtcaatgacaaagtgctcgttagagatggtactgttgatactcttgtttttacaaacaagacatcactacccactaacgtagcttttgagttgtatgccaagcgtaaggtaggactcacccctcccattacgatcctacgtaacttgggtgttgtttgtacatctaagtgtgtcatttgggactatgaagccgaacgtccacttactacttttacaaaggatgtctgtaaatataccgactttgagggtgacgtttgtacactctttgataacagcattgttggttcattagagcgattctctatgacccagaatgctgtgcttatgtcacttacagctgttaaaaagcttactggcataaagttaacttatggctatcttaatggtgtcccagttaacacacatgaagataaaccttttacttggtatatttacactaggaagaacggcaagttcgaggactatcctgatggctattttacccaaggtagaacaaccgctgattttagccctcgtagcgacatggaaaaggacttcctaagtatggatatgggtttgtttattaacaagtacggacttgaagattacggctttgagcacgttgtgtatggtgatgtttcaaaaaccacccttggtggtttacatctactaatttcgcaggtgcgtctggcctgtatgggtgtgcttaaaatagacgagtttgtgtctagtaatgatagcacgttaaagtcatgtactgttacatatgctgacaaccctagtagtaagatggtttgcacgtatatggatctcctgcttgacgattttgttagcattcttaaatctttggatttgagcgttgtatctaaggttcatgaagttatggttgattgtaaaatgtggaggtggatgttgtggtgtaaggatcataaactccagacattttatccacaacttcaagccagtgaatggaagtgtggttattccatgccttctatttacaagatacaacgtatgtgcttagaaccttgcaatctctataactatggtgctggtgttaagttacctgatggcattatgtttaacgtagttaaatacacacagctttgtcaatatctcaatagcaccacaatgtgtgtaccccatcacatgcgtgtgctacatcttggtgctggctccgataagggtgttgcacctggcacggctgtcttacgacgttggttgccactggatgccattatagttgacaatgatagtgtggattacgttagcgatgctgattatagtgttacaggagattgctctaccttatacctgtcagataagtttgacttagttatatctgatatgtatgatggtaagattaaaagttgtgatggggagaacgtgtctaaagaaggcttctttccctatattaatggtgttatcactgaaaagttggcacttggtggtactgtagctattaaggtgacggagtttagttggaataagaagttgtatgaactcattcagaagtttgagtattggacaatgttctgtaccagtgttaacacgtcatcgtcagaggcatttttaattggtgttcactatttaggtgattttgcaagtggcgctgtgattgacggcaacaccatgcatgccaattatatcttctggcgtaattccacaattatgactatgtcttacaacagtgtgcttgatttaagcaagttcaattgtaagcataaggctacagttgttgttaatttaaaagactcatccattagtgatgttgtgttaggcttgttgaagaatggtaagttgctagtgcgtaataatgacgccatttgtggcttttctaatcatttggtcaacgtaaacaaatgaggtctttaatttacttctggttgctcttaccagtacttccaacactcagcctaccacaagatgtcactaggtgccagtctactactaactttaggcggttcttttcaaaatttaatgttcaggcacctgccgtcgtcgttttgggtggttacctacctagtatgaactcttctagctggtactgtggcacaggcattgaaactgctagtggcgttcatggtatttttctcagctacatcgattctggtcagggctttgagattggcatttcgcaagagccgtttgatcctagtggttaccagctttatttacataaggccactaatggtaacactaatgctattgcacgactgcgcatttgccagtttcccgataataaaacattgggccctactgttaatgatgttacaacaggtcgtaactgcctattcaacaaagccattccagcttatatgcgtgatggaaaagatattgttgtcggcataacatgggataatgatcgtgtcactgtttttgctgacaagatctatcatttttatcttaaaaatgattggtcccgcgttgcgacaagatgttacaatcgcagaagttgtgctatgcaatatgtttatacacctacctactacatgcttaatgttactagtgcaggtgaggatggcatttattatgaaccctgtacagctaattgcactggttacgctgccaatgtatttgccactgattccaatggccatataccagaaggttttagttttaataattggtttcttttatccaatgactccactttgttgcatggtaaagtggtttccaaccaacccttgttggtcaattgtcttttggccattcctaagatttatggactaggccaatttttctcattcaatcacacgatggatggcgtttgtaatggagctgctgtggatcgtgccccagaggctctgaggtttaatattaatgacacctccgtcattcttgctgaaggctcaattgtacttcatactgctttaggaacaaatctttcttttgtttgcagtaattcctcagatcctcatttagccatctttgccatacctctgggtgctactgaagtaccctactattgctttcttaaagtggatacttacaactccactgtttataaattcttggctgttttacctcctactgtcagggaaattgtcatcaccaagtatggtgatgtttatgtcaatgggtttggctatttgcatctcggtttgttggatgctgtcacaattaatttcactggtcatggcactgacgatgacgtttcaggtttctggaccatagcatcgactaattttgttgatgcactcatcgaggttcaaggaacttccattcagcgtattctttattgtgatgatcctgttagccaactcaagtgttctcaggttgcttttgaccttgacgatggtttttaccccatctcttctagaaaccttctgagtcacgaacagccaatttcttttgttactttgccatcatttaatgatcattcttttgttaatattactgtctctgcggcttttggtggtcttagtagtgccaatctcgttgcatctgacactactatcaatgggtttagttctttctgtgttgacactagacaatttaccattacactgttttataatgttacaaacagttatggttatgtgtctaaatcacaggatagtaattgtcctttcaccttgcaatctgttaatgattacctgtcttttagcaaattttgtgtttcaaccagccttttggctggtgcttgtaccatagatctttttggttaccctgcgttcggtagtggtgttaagttgacgtccctttattttcaattcacaaaaggtgagttgattactggcacgcctaaaccacttgaaggtatcacagacgtttcttttatgactctggatgtgtgtaccaagtatactatctatggctttaaaggtgagggtattattacccttacaaattctagcattttggcaggtgtttattatacatctgattctggacagttgttagcctttaagaatgtcactagtggtgctgtttattctgtcacgccatgttctttttcagagcaggctgcatatgttaatgatgatatagtgggtgttatttctagtttgtctaactccacttttaacaatactagggagttgcctggtttcttctaccattctaatgacggctccaattgtacagagcctgtgttggtgtatagtaacataggtgtttgtaaatctggcagtattggctatgttccatctcagtatggccaagtcaagattgcacccacggttactgggaatattagtattcccaccaactttagtatgagtattagaacagaatatttacagctttacaacacgcctgttagtgttgattgtgctacatatgtttgtaatggtaactctcgttgtaaacaattactcacccagtacactgcagcatgtaagaccatagagtcagcattacaactcagcgctaggcttgagtctgttgaagttaactctatgcttaccatttctgaagaggctttacagttagctaccatcagttcgtttaatggtgatggatataactttactaatgtgctgggtgcttccgtgtacgatcctgcaagtggcagggtggtacaaaaaaggtctgttattgaagacttgctttttaataaagtggttactaatggccttggtactgttgatgaagactataagcgctgttctaatggtcgctctgtggctgatctagtctgtgcgcagtattactctggtgtcatggtactacctggcgttgttgacgctgagaagcttcacatgtacagtgcgtctctcataggtggtatggcgctaggaggtataactgctgcagcggcattgccttttagctatgctgttcaagcgagactcaattatcttgctttacagacggatgttctacagcggaaccagcaattgcttgctgagtcttttaactctgctattggtaatataacttcagcctttgagagtgttaaagaggctattagtcaaacttccaagggtttgaacactgtggctcatgcgcttactaaggttcaagaggttgttaattcgcagggttcagctttgaaccaacttaccgtacagctgcaacacaacttccaagccatttctagttctattgatgacatttattcccgactggacattctttcagccgatgttcaggttgatcgtctcatcaccggcagattatcagcacttaatgcttttgttgcccaaaccctcactaagtatactgaggttcaggctagcaggaagctagcacagcaaaaggttaatgagtgcgtcaaatcgcaatctcagcgttacggtttttgtggtggtgatggcgagcacattttctctctggtacaggccgcacctcagggcctgctgttcttacatacagtacttgtaccgggtgattttgtaaatgttcttgccatcgctggcttatgcgttaatggtgaaattgccttgactctacgtgagcctggcttagtcttgtttacgcatgaacttcaaacttatactgcgacggaatattttgtttcatcgcgacgtatgtttgaacctagaaaacctaccgttagtgattttgttcaaattgagagttgtgtggtcacctatgtcaatctgactagcgaccagctaccagatgtaatcccagattacatcgatgttaacaaaacacttgatgagattttagcttctctgcccaatagaactggtccaagtcttcccctagatgtttttaatgccacttatcttaatcttactggtgaaattgcagatctagagcagcgttcagagtctctccgtaatactacagaagagctccgaagtctcattaacaacatcaacaacacacttgttgaccttgagtggctcaaccgagttgagacatacatcaagtggccgtggtgggtttggttgatcattgttattgttctcatctttgttgtgtcattactagtgttctgctgcatttccacgggttgttgtggatgctgcggttgctgcggtgcttgtttttcaggttgttgtaggggtcctagacttcaaccttacgaagcttttgaaaaggtccacgtgcagtgatgtttcttggactttttcaatacacgattgacacagttgtcaaagatgtctcgaagtctgtcaacttgtctttggatgctgtccaagagttggagctcaatgtagttccaattagacaagcttcaaatgtgacgggttttcttttcaccagtgtttttgtttacttctttgcactgtttaaagcgtcttctttgaggcgcaattatattatgttggcagcgcgttttgctgtcgtctttctctattgcccacttttatattactgtggtgcacttttagatgcaactattatttgttgcgcacttattggcaggctttgtttagtctgcttttactcctggcgctataaaaatgcgctttttattatctttaatactacgacactttcttttctcaatggtaaagcagcttattatgacggcaaatccattgtgattctagaaggtggcgaccattacatcacttttggcaactcttttgttgctttcgttagtaacattgacttgtatctagctatacgtgggcggcaagaagctgacctacatctgttgcgaactgttgagcttcttgatggcaagaagctttatgtcttttcgcaacatcaaattgttggcattactaatgctgcatttgactcaattcaactagacgagtatgctacaattagtgaatgataatggtctagtagttaatgttatactttggcttttcgtactctttttcctgcttattataagcattaccttcgtccaattggttaatctgtgcttcacttgtcaccggttgtgtaatagcgcagtttatacacctatagggcgcctgtatagagtttataagtcttacatgcgaattgaccccctccccagtactgttattgacgtataaacgaaatatgtctaacggttctattcccgttgatgaggtgattgaacaccttagaaactggaatttcacatggaatatcatactgacgatactacttgtagtgcttcagtatggccattacaagtactctgtgttcttgtatggtgtcaagatggctattctatggatactttggcctcttgtgttggcactgtcactttttgacgcatgggctagcttccaggtcaactgggtctttttcgctttcagcatccttatggcttgcatcactcttatgctgtggataatgtattttgtcaatagcattcggttgtggcgcaggacacattcttggtggtctttcaatcctgaaactgacgcgcttctcactacttctgtgatgggccgacaggtctgcattccagtgcttggagcaccaactggtgtaacgctaacactccttagtggtacattgcttgtagagggctataaggttgctactggcgtacaggtaagtcaattacctaatttcgtcacagtcgccaaggccactacaacaattgtctacggacgtgttggtcgttcagtcaatgcttcatctggcactggttgggctttctatgtccggtcaaaacacggcgactattcagctgtgagtaatccgagtgcggttctcacagatagtgagaaagtgcttcatttagtctaaacagaaactttatggcttctgtcagctttcaggatcgtggccgcaaacgggtgccattatctctctatgcccctcttagggttactaatgacaagcccctttctaaggtacttgcaaacaacgctgtacccactaacaaggggaataaggaccagcaaattgggtactggaatgagcaaattcgctggcgcatgcgccgtggtgagcgaattgaacaaccttccaattggcatttctactacctcggaacaggacctcacggcgacctccgttataggactcgtactgagggtgttttctgggttgctaaagaaggcgcaaagactgaacccactaatttgggtgtcagaaaggcgtctgaaaagccaatcattccaaaattctctcaacagctccccagtgtagttgagattgttgaacctaacacacctcctgcttcacgtgcaaattcgcgtagcaggagtcgtggcaatggcaacaataggtctagatctccaagtaacaacagaggcaataaccagtcccgtggtaattcacagaatcgtggaaataaccagggtcgtggagcttctcagaacagaggaggcaataataataacaataacaagtctcgtaaccagtccaataacaggaaccagtcaaatgaccgtggtggtgtaacatcacgcgatgatctggtggctgctgtcaaggatgcacttaaatctttgggtattggagaaaatcctgacaggcataagcaacagcagaagcctaagcaggaaaagtctgacaacagcggcaaaaatacacctaagaagaacaaatccagggccacttcgaaggaacgtgacctcaaagacatcccagagtggaggagaattcccaagggcgaaaatagcgtagcagcttgcttcggacccagagggggcttcaaaaactttggagatgcggaatttgtcgaaaaaggtgttgatgcgtcaggctatgctcagatcgccagtttagcaccaaatgttgcagcattgctctttggtggtaatgtggctgttcgtgagctagcggactcttacgagattacatacaactataaaatgactgtgccaaagtcagatccaaatgttgagcttcttgtttcacaggtggatgcatttaaaactgggaatgcaaaactccagagaaagaaggaaaagaagaacaagcgtgaaaccacgctgcagcagcatgaagaggccatctacgatgatgtgggtgcgccatctgatgtgacccatgccaatctggaatgggacacagctgttgatggtggtgatacggccgttgaaattatcaacgagatcttcgatacaggaaattaaacaatgttagaccggcttatcctggctatgttccagggtagtgccattacactgttattactgagtgtttttctagcgacttggctgctgggctatggctttgccctctaaccagcggtcttggtcttgcacacaacggtaagccagtggtaatgtcagtgcaagaaggatattaccatagcactgtcacgaggggaacgcagtaccttttcatctaaacctttgcacgagtaattaaagatccgcttgacgagcctatatggaagagcgtgccaggtatttgacttaaggactgttagtaactgaagacctgacggtgttgatatggatacac

SEQ ID NO: 30058 - DNA, 27608 bp, Avian infectious bronchitis virus
  misc_structure (12348)...(12433): Frameshift Site
  misc_structure (12348)...(12355): Slippery Site
  misc_structure (12361)...(12433): Pseudoknot
  misc_structure (12361)...(12370): Stem 1 up
  misc_structure (12374)...(12378): Stem 2 down
  misc_structure (12381)...(12390): Stem 1 down
  misc_structure (12424)...(12428): Stem 2 up
acttaagatagatattaatatatatctattacactagccttgcgctagatttttaacttaacaaaacggacttaaatacctacagctggtcctcataggtgttccattgcagtgcactttagtgccctggatggcacctggccacctgtcaggtttttgttattaaaatcttattgttgctggtatcactgcttgttttgccgtgtctcactttatacatctgttgcttgggctacctagtgtccagcgtcctacgggcgtcgtggctggttcgagtgcgaggaacctctggttcatctagcggtaggcgggtgtgtggaagtagcacttcagacgtaccggttctgttgtgtgaaatacggggtcacctccccccacatacctctaagggcttttgagcctagcgttgggctacgttctcgcataaggtcggctatacgacgtttgtagggggtagtgccaaacaacccctgaggtgacaggttctggtggtgtttagtgagcagacatacaatagacagtgacaacatggcttcaagcctaaaacagggagtatctcccaaaccacgggatgtcattcttgtgtccaaagacatccctgaacaactttgtgacgctttgtttttctatacgtcacataaccctaaggattacgctgatgcttttgcagttaggcagaagtttgaccgtagtctccagactgggaaacagttcaaatttgaaactgtgtgtggtctcttcctcttgaagggagttgacaaaataacacctggcgtcccagcaaaagttttaaaagccacttctaagttggcagatttagaagacatctttggtgtctctcctttagcgcggaagtaccgtgaattgttgaaaacagcgtgtcagtggtctcttactgtagaagcactggatgttcgtgcacaaactctcgatgaaatttttgaccccactgaaatactttggcttcaggtggctgcaaaaattcatgtttcatctatggcaatgcgcaggcttgttggagaagtaactgcaaaagtcatggatgctctgggctcaaacttgagtgctctttttcaaattgttaaacaacaaatagccagaatctttcaaaaggcactggctatttttgagaatgtgaatgaattaccacagcgtattgcagcacttaagatggcttttgccaagtgtgctaggtcaattactgttgtggttgttgaaagaactctagttgttaaagagttcgcaggaacttgtcttgcaagcattaatggtgctgtcgcaaaattctttgaagagttgccaaacggcttcatgggttctaagattttcacaacacttgccttctttaaagaggcagctgtgagagttgtggagaacataccaaatgcaccgagaggtactaagggatttgaagttgttggcaatgccaaaggcacacaggtagttgtgcgcggcatgcgaaatgacttaacattgcttgaccaaaaagctgatattcctgttgaaccagaaggttggtctgcaattttggatggacatctttgctatgtctttaggagtggtgatcgcttttatgctgcacctctttcaggaaattttgctttgagtgatgttcattgctgtgagcgtgtagtctgtctatctgatggtgtaacaccggagataaatgatggactcattctagctgcaatctactcttcttttagtgtctctgagcttgtaacagctcttaaaaagggtgaaccattcaagttcttgggccataaattcgtgtatgcgaaggatgcagcagtgtcttttactttagcgaaggctgccactattgcagatgtcttgaggctgtttcaatcagctcgtgtgatagcagaagatgtttggtcttcatttactgaaaagtcttttgaattctggaagcttgcatatggaaaagtgcgcaaccttgaagaatttgtgaagacctatgtttgtaaggctcaaatgtcgattgtgattctagcagcagtgcttggagaggacatttggcatcttgtctcacaagtcatctataaattaggtgttctttttactaaagtcgttgacttttgtgacaaacactggaaaggtttttgtgtacagttgaaaagagctaagctcattgtcaccgaaaccttctgtgttttaaaaggagttgcacagcattgttttcaactgctgctagatgcaatacactctttgtacaagagttttaagaagtgtgcacttggtagaatccatggagatttgctcttctggaaaggaggtgtgcataaaattgttcaagatggcgatgaaatatggtttgacgccattgatagtgttgatgttgaagatctgggtgttgttcaggaaaaatcgattgattttgaggtttgcgatgacgtgacacttccagaaaaccaacctggtcatatggttcaaatagaggatgatggtaagaactacatgttcttccgttttaaaaaggatgagaacatttattatacaccaatgtctcaacttggtgctattaatgtggtttgcaaagcaggcggtaagactgtcacctttggagaaactacagtacaagagataccaccacctgatgtcgtgcctattaaggttagcatagaatgttgtggtgaaccatggaatacgatcttcaagaaggcttataaagagcctatagaagtagatacagacctcacagtagaacaattgctctctgtgatctatgagaaaatgtgtgacgaccttaaattgtttccagaggcaccagagcctccaccatttgagaatgtcgcacttgttgataagaacggtaaagatttggattgtataaaatcttgccatttgatctatcgtgactatgagagcgatgatgacatcgaggaggaagatgctgaggagtgtgacacagactcaggtgaagctgaggagtgtgacactaattcagaatgtgaagaagaggatgaggatactaaagtgttggctcttatacaagacccggcaagtattaaataccctctgcctcttgatgaagattatagcgtctataatggatgtattgtacacaaggacgctcttgatgttgtgaatttaccatctggtgaagaaacttttgttgtcaataactgttttgagggagctgttaaaccacttccacagaaggtagttgatgttcttggtgactggggagaggctgttgatgcgcaagaacaactgtgtcaacaagagcctctgcaacatacctttgaagaaccagtcgaaaattctactggtagttctaagacaatgactgaacaagtcgttgtagaagatcaagaactacctgttgttgaacaagatcaggatgtagttgtttatacacctacagatcttgaagttgcaaaagaaacagcagaagaggttgatgagtttattctcatttttgctgttcctaaagaagaagttgtgtcccagaaagatggggcacagattaaacaagagcctattcaagttgttaaaccacaacgtgagaagaaggctaaaaagttcaaagttaaaccagccacatgtgagaaacctaaatttttggagtataaaacatgtgtgggtgatttgactgttgtaattgccaaagcattggatgagtttaaagagttctgcattgtaaatgctgcaaatgagcatatgactcatggtagtggcgttgcaaaggcaattgcagacttttgtggactggattttgttgaatattgtgaggactatgttaagaaacatgggccacaacagagacttgttacaccttcgtttgtcaaaggcattcaatgtgtgaataatgttgtaggaccccgccatggagacaacaacttgcatgagaagcttgttgctgcctacaagaatgtgcttgtagatggcgtagtcaattatgttgtgccagttctttcattaggaatttttggtgtagattttaaaatgtcaatagacgcaatgcgtgaagcttttgaaggttgcaccatacgcgttcttttgttttctctgagccaagaacacatcgattatttcgatgtaacttgcaaacagaagacaatttatcttacggaggatggtgttaaataccgctccattgttctaaaacctggtgactcattgggtcaatttggacaggtttatgctaaaaacaagatagtttttacagccgatgatgttgaggacaaagaaattctctacgtccccacgactgataaaagcattcttgaatactatggtttagatgcgcaaaagtatgtaatatatttgcaaacgcttgcgcagaaatggaatgtccaatatagggacaattttcttatactagagtggcgcgatggaaattgttggattagttcagcaatagttctccttcaagctgctaaaattaggtttaaaggttttctaacagaagcgtgggctaaactgttaggtggagatcctacagactttgttgcctggtgttatgcaagttgtactgctaaagtaggtgatttctcagatgctaattggcttttagcgaatttagcagaacattttgacgcagattacacaaatgcgtttcttaagaagcgcgtttcgtgtaactgtggtattaagagctatgagcttagaggccttgaagcttgtattcagccagttcgggcaactaatctgctacattttaagacgcaatattcaaattgcccaacctgtggcgcaaataatacggatgaagtaatagaagcttcgttaccgtacttattgctttttgctactgatggtcctgctacagttgattgtgatgaagatgctgtggggactgtcgtgtttgttggttctactaatagtggccattgttatacacaagctgcagggcaagcttttgataatcttgctaaagatagaaaatttggaaagaagtcgccttacattactgcaatgtatacgcgattcgcttttaagaatgaaacctctttgcctgttgctaaacagagcaagggtaagtctaagtcggtaaaggaagatgtttctaaccttgctactagttctaaggccagttttgataatcttactgacttcgaacagtggtatgatagtaacatctatgaaagtcttaaagtgcaggaatcacctgataactttgataaatatgtgtcattcacaacaaaggaagattctaagttgccattgacacttaaggttagaggtattaaatcagttgttgactttagatcgaaggatggttttatttataagttaacacctgatactgatgaaaattcaaaagcaccagtctactacccagtcttggacgctattagtcttaaggcaatatgggtggaaggtaatgctaactttgttgttggtcatccaaattattatagtaagtctcttcatattcctactttttgggaaaatgctgagaattttgttaaaatgggtgataaaattggtggtgtaactatgggactttggcgtgcagaacaccttaataaacctaatttggagagaattttcaacattgctaagaaagccattgttggatctagtgttgttactacacaatgcggtaaattaataggtaaagcagctacattcattgctgataaagtaggtggtggtgtagttcgcaatattacagatagcattaagggtctttgtggaattacacgagggcattttgaaagaaaaatgtctccacaattcctaaagacgcttatgttctttttattctatttcttgaaggctagtgttaagagtgttgtcgctagctataagaccgtgttatgtaaggtggtacttgctactttacttatagtttggtttgtctacacaagtaacccagtaatgtttacaggaatacgtgtgttagattttctattcgagggttctttgtgtggtccttataaagactatggtaaagattcttttgatgtgttacgatattgtgcagatgattttatttgtcgtgtgtgtttacatgacaaagattcacttcatttgtacaaacacgcttatagtgtagagcaggtctataaagatgcagcttctggttttatttttaattggaattggctttatttggtctttctaatattatttgttaaaccagtggcaggttttgttattatttgctattgtgttaagtatttggtattgaattcaactgtgctgcaaactggtgtttgttttttagattggtttgtacaaacagtttttagtcactttaattttatgggagcagggttttatttctggctcttttacaagatatatatacaggtgcatcatatactgtattgtaaggatgtaacatgtgaagtgtgcaaaagggttgcacgcagcaacaggcaagaggttagcgtggttgttggtggacgcaagcagatagtgcatgtttacactaactctggctataacttttgtaagagacataattggtattgtagaaattgtgatgattatggtcaccaaaatacatttatgtctcctgaagttgctggcgagctctctgaaaagcttaagcgccatgttaaacctacagcatacgcttaccacgttgtggatgaggcatgcttagttgatgattttgtcaatttaaaatataaagctgcaactcctggtaaggatagtgcatcttcagctgttaagtgtttcagtgttacagatttcttgaagaaagctgtttttcttaaggaagcactgaaatgtgaacaaatatctaatgatggttttatagtgtgtaatacacagagtgctcatgcattagaggaagcaaagaatgcagccatctattatgcgcaatatctgtgtaagccaatacttatacttgaccaggcactttatgagcaattagtagtagagcctgtgtctaagagtgttatagataaagtgtgtagcattttgtctagtataatatctgtagatactgcagctttaaattataaggcaggcacacttcgtgatgctctgctttctattactaaagacgaagaggccgtagatatggctatattctgtcataatcatgatgtggattacactggtgatggttttactaatgtgataccgtcatatggtatagacactggcaagttaacacctcgtgatagagggtttttgataaatgcagatgcttctattgctaacttaagagttaaaaatgctccgccggtagtatggaagttttctgagcttattaagttgtctgacagttgtcttaaatatttaatttcggctactgttaagtcaggtgttcgtttctttataacaaagtctggtgctaaacaagttattgcttgtcatacacagaagttgttagtagagaaaaaggcaggtggtattgttagcggcacctttaagtgttttaagagttattttaaatggctcttgatcttttacatactttttacagcatgttgttcgggttattactatatggaggtgagtaaaagttttgttcaccccatgtatgatgtaaactccacactgcatgttgaaggttttaaagttatagataaaggtgttcttagggaaattgtaccagaagatacatgtttctctaataaatttgttaattttgatgctttttggggcagaccatatgataatagtagaaactgtccaattgtcacagctgttatagatggtgatgggacagtagctacaggtgttcctggttttgtgtcctgggttatggatggtgttatgtttatacatatgacacagactgagagaaaaccgtggtacattcctacttggtttaatagagaaattgtcggttacactcaggattcaattattactgagggtagtttttatacatctatagcgttattttccgctaggtgtttatatttaacagccagcaatacacctcaattgtattgctttaatggtgataatgatgcacctggggctttgccatttggtagtattattcctcatagagtttatttccaacccaatggtgttaggcttatagttccacaacaaatactgcacacaccctacgtagtaaagtttgtatcagacagctattgtaggggtagtgtgtgtgagtacactagaccaggttactgtgtgtcattaaacccacaatgggttttgtttaatgacgaatacacaagtaaacccggtgttttctgtggttctactgttagagaacttatgtttagtatggttagtacattctttactggtgttaaccccaatatctatatgcaattagcaactatgtttttaatactagttgttgttgtattaatctttgcaatggttataaagtttcaaggtgtttttaaagcttatgcaaccactgtttttataacaatgttagtttgggtaattaacgcatttattttgtgtgtacatagttacaacagtgttttagctgttatattactagtactctattgctatgcgtcattggttacaagtcgcaatactgttataataatgcattgttggcttgtttttacctttggtttaatagtacccacatggttggcttgttgctacctgggatttattatttatatgtatacaccgttgtttttatggtgttatggtactacaaaaaacactcgtaagctgtatgatggcaatgagtttgttggtaattatgatcttgctgcgaagagcacttttgttattcgcggctctgaatttgttaagcttactaatgagataggtgataaatttgaggcctacctttcagcgtatgctagattaaagtactattcaggcactggcagtgaacaagattatttgcaagcttgtcgtgcatggttagcttatgctttggaccaatatagaaatagtggtgtggaaattgtttatactccgccacgttactctattggtgttagtagattacaatctggttttaagaaactggtttctcctagtagtgctgttgaaaagtgcattgttagtgtctcttatagaggtaataatcttaatggactgtggctaggtgacactatctactgtcctcgtcatgtattgggtaagttttcaggtgaccaatggaatgatgtacttaatcttgctaataatcatgagtttgaagttacaactcaacatggtgttactttgaatgttgtcagtaggcgtttaaaaggtgcagttttaattttacaaactgctgttgctaatgctgaaactccaaagtataagtttattaaagctaattgtggtgatagtttcactatagcttgtgcttatggtggtacagttgtaggactctaccctgttactatgcgttctaatggtactattagagcatcttttcttgcgggagcctgtggttcagttggttttaatatagaaaagggtgtagttaatttcttttatatgcaccatcttgagttacctaatgcattacacactggaactgacctaatgggtgaattctatggtggttatgttgatgaagaggttgcacaaagagtgccaccagataatttagttactaacaatattgtagcatggctctatgcggcaattattagtgttaaggagagtagtttctcgctgcctaaatggttggagagtactactgttagtgttgatgattataataagtgggctggtgacaatggttttacaccattttctactagtaccgctattactaaattaagtgctataactggagttgatgtttgtaagctccttcgcactattatggtaaaaaatagccagtggggtggtgaccccattttagggcaatataattttgaagatgaattgacaccggagtctgtatttaatcagattggtggtgttagattacaatcttcttttgtaagaaaagctacatcttggttttggagtagatgtgtgttagcttgcttcttatttgtgttgtgtgctattgtcttgtttacggcagtgccacttaaattttatgtatatgcagctgttattttgttaatggctgtactttttatttcttttactgttaaacatgttatggcatatatggatacttttctattgccaacattgattacagttattattggagtttgtgctgaagtgcctttcatctacaatactctaattagtcaagttgttattttcttaagtcaatggtatgacccagtagtctttgatactatggtaccatggatgttcttgccactagtgttgtatactgcttttaagtgtgtacaaggttgctatatgaattctttcaatacttctttgttaatgctgtatcagtttgtgaagttaggttttgttatttacacctcttctaatactcttactgcatacacagaaggtaattgggagttattcttcgagttggtgcacactactgtgttggctaatgttagtagtaattctttaattggtttatttgtttttaagtgtgctaaatggatgttgtattattgtaatgcaacatacttaaacaattatgtactaatggcagttatggttaactgcattggctggctctgcacttgttactttgggttgtattggtgggttaataaggtttttggtttaaccttaggtaaatacaattttaaagtttcagtagatcaatataggtatatgtgtttgcacaagataaacccacctaaaactgtgtgggaagtcttttcgacaaatatacttatacaaggaattggtggtgaccgtgtgttgcctattgctacagttcaagctaaattgagtgatgtaaagtgtacaactgttgttttaatgcagcttttgactaagcttaatgttgaagcaaattcaaaaatgcatgtttatcttgttgagttacacaataaaattcttgcttctgatgatgttggagagtgcatggataatttgttgggtatgcttataacactattttgtatagattctactattgatttgagtgagtattgtgatgacatacttaagaggtcaactgtattacaatcggttactcaagaattctcacatataccctcttatgctgaatatgaaagggctaagaatctttatgaaaaggttttagttgattctaaaaatggtggtgttacacagcaagagcttgctgcatatcgtaaagctgccaatattgcaaagtcagtttttgatagagacttggctgtccaaaagaagttagatagcatggcagagcgtgctatgacaacaatgtataaagaggcgcgtgtaacagatagacgagcaaaattagtctcatcactacatgcgttacttttctcaatgcttaagaaaatagattctgaaaagcttaatgtcttgtttgaccaggctagtagtggtgttgtgcccctagcgactgttccaattgtttgtagtaataagcttacacttgtaataccagacccagaaacgtgggtcaagtgtgtggaaggtgtgcatgttacatattcaacagttgtttggaatatagacactgttattgatgccgatggcacagagttacacccaacttctacaggtagtggattgacatactgtataagtggtgctaatatagcatggcctttaaaggttaacttgactaggaatgggcataataaggttgatgttgttttgcaaaataatgagcttatgccacatggtgttaaaacaaaggcttgcgtagcaggtgtagatcaagcacattgtagcgtagagtctaaatgttattatacaaatattagtggcaattcagttgtagctgctattacttcttcaaatccaaatctgaaagtagcttcgtttttgaatgaggcaggcaatcagatttatgtagacttagacccaccatgtaaatttggcatgaaagtgggtgtcaaggttgaggttgtttacttgtattttataaagaatacaaggtcgattgttaggggtatggtacttggtgctatatctaatgttgttgtcttacagtctaaagggcatgaaacagaggaagtggatgctgttggcattctttcactatgttcatttgcagtagatcccgcggacacatattgtaaatatgtggcagcaggtaatcaacctttaggtaactgtgttaaaatgttgacagtgcataatggtagtggttttgctataacttcaaagccaagtcctactcctgaccaggattcttatggaggagcttctgtgtgtctctattgtagagcacacatagcacatccaggaagtgtaggaaatttagatggacgttgtcaatttaaaggttcttttgtgcaaatacctactacggagaaagaccccgttggattctgtctacgtaataaggtttgcactgtttgccagtgttggattggttatggatgtcagtgtgattcacttagacaaccaaaatcttctgttcaatcagttgctggagcatctgattttgataagaattatttaaacgggtacggggtagcagtgaggctcggctgataccccttgctagtggatgtgatcctgatgttgtaaagcgagcctttgatgtttgtaataaggaatcagctggtatgtttcaaaatttgaagcgtaactgcgctagattccaggaactacgcgatactgaagatggaaatcttgagtatcttgattcttactttgtagttaaacaaaccactcctagtaattatgaacatgaaaaatcttgttacgaagacttaaagtcagaagtaacagctgaccatgacttctttgtgttcaataagaacatttacaatattagtaggcaacggcttactaaatatactatgatggacttctgctatgctttgagacatttcgacccaaaggattgtgaagttcttaaagaaatacttgtcacttatggttgtatagaagactatcaccctaagtggtttgaggagaataaggattggtacgacccaatagaaaactcaaaatattatgtcatgttggctaaaatgggacctattgtacgacgtgctttattgaatgctattgagttcggaaaccttatggttgaaaaaggttatgttggtgttattacactcgataaccaagaccttaatggcaaattttatgattttggtgattttcagaagacggcacctggtgctggtgttcctgtttttgatacgtattattcttacatgatgcccatcatagccatgacggatgctttagcacctgagaggtactttgaatatgatgtgcacaagggttataaatcttatgatctcctcaagtatgattatactgaggagaaacaagaattgtttcagaagtactttaagtactgggatcaagagtatcatcctaactgccgtgactgtagtgatgacaggtgtttgatacattgtgcaaacttcaatatcttgttttctacacttataccgcagacttctttcggtaatttgtgtagaaaagtttttgttgatggtgtaccatttatagctacttgtggctatcattctaaggaacttggtgttattatgaatcaagataacaccatgtctttttcaaaaatgggtttaagtcaactcatgcagtttgttggagatcctgctttgttagtgggaacatccaataatttagttgatcttagaacgtcttgttttagtgtttgtgcgttaacatctggtattactcatcaaacggtaaagccaggtcactttaacaaggatttctatgattttgcagagaaggctggtatgtttaaggagggttcgtctataccacttaaacattttttctatcctcaaactggtaatgctgctataaacgattatgattattatcgttataacaggcctaccatgtttgacatatgtcaacttctattttgtttagaagtgacttctaaatactttgagtgttatgaaggcggctgtataccagctagccaagttgtagttaacaacttagataagagtgcaggctatccatttaataagtttggaaaagcccgcctctattatgaaatgagtctagaggaacaggaccaactcttcgagattacgaagaagaatgtcctacccactataactcaaatgaatttaaaatatgccatatccgcgaaaaatagagcgcgtacagtggcaggtgtgtctatcctttctactatgactaataggcagtttcatcagaagattcttaagtctatagtcaacactagaaatgcttctgtagttattggaacaaccaagttttatggcggttgggacaacatgttgagaaacctgattcagggtgttgaagacccaattcttatgggttgggattatcctaagtgtgatagagcaatgcctaatttgttgcgtatagcagcatccttagtacttgctcgcaaacacactaactgttgtagttggtctgaacgcatttataggttgtataatgaatgcgcccaggtcttatctgaaactgtacttgctacaggtggtatttatgttaaacctggtggcactagcagtggtgatgctactactgcttatgcaaacagtgtttttaacataatacaagccacatctgctaatgttgcgcgtcttttgagtgttataacgcgtgatattgtctatgataatattaagagcttgcagtatgaattgtatcagcaggtctacaggcgagttaattttgacccagcctttgttgaaaagttttattcttacttatgtaagaatttttcgttgatgatcttgtctgacgacggtgttgtttgttacaacaacacattagccaaacaaggtcttgtagcagatatttctggttttagagaggttctctactatcagaataatgtttttatggctgattctaaatgttgggttgaaccagatttagaaaaaggcccacatgagttttgttcacaacacacaatgctagtggaggttgatggtgagcctaagtatttgccatacccagacccttcacgcattttgggtgcatgtgtttttgtagatgacgtggataagacagaacctgtggctgttatggagcgttatatagctcttgccatagatgcttatccactagtacatcatgaaaatgaagagtacaagaaggtattctttgttctccttgcatatatcagaaaactctatcaagagctttctcagaatatgcttatggactactcttttgtaatggatatagacaagggtagtaaattttgggaacaggagttctatgagaatatgtatagagctcctacgactttacaatcttgtggcgtttgtgtagtttgtaatagtcaaactatactacgctgcggtaattgtattcgtaaaccgtttttgtgttgtaagtgttgctatgaccacgtcatgcatacggaccacaaaaatgttttatctataaatccttatatttgctcacagctaggttgcggtgaagcagatgttactaaattgtacctcgggggtatgtcgtacttctgtggtaatcataaaccgaaattgtcaataccgttagtatctaatggtactgtttttggaatttacagggctaattgtgctggtagtgaaaatgttgatgattttaatcaactagctactactaattggtccattgtcgaaccttatattttagcaaatcgctgtagtgattcattgagacgttttgctgcagagacagtaaaagccacagaagaattacataagcaacaatttgctagtgcagaagtgcgagaagtattctcagatcgtgaattgattctatcatgggaaccaggaaaaaccaggccgccattgaatagaaattatgttttcacaggttatcactttacaagaactagtaaggtgcagcttggtgattttacatttgaaaaaggtgaaggtaaggatgttgtctattataaagcaacgtctactgctaaattgtctgtaggagacatttttgttttaacctcacacaatgttgtttctctcgtagcgccaacattgtgtccacaacaaaccttttctaggtttgtaaatttaagacctaatgtaatggtacctgaatgttttgtaaataacattccactttaccatttagtaggtaaacagaagcgtactacagtacaaggtcctcctggcagtggtaaatcccactttgctataggccttgcagtatactttagtagcgctcgtgttgtttttactgcatgttctcatgcagctgttgatgctttatgtgaaaaagcttttaagtttcttaaagttgatgattgcactcgtatagtaccccaaaggactactgtcgattgcttctcaaaatttaaagctaatgacacaggcaaaaagtacatttttagtactattaatgccttgccggaagttagttgtgatattcttttggttgacgaggttagtatgttgaccaattacgaattgtcctttattaatggtaagataaattaccaatatgttgtgtatgtaggtgatccggctcaattaccggcaccccgcactttacttaatggttcactttctccaaaggattataatgttgtcacaaaccttatggtttgtgttaaacctgatattttccttgcaaagtgttatcgttgtcctaaggaaattgtagacactgtgtctactcttgtttatgatggaaagtttattgcaaataacccagaatcacgtgagtgtttcaaggttatagttaataatggcaattctgatgtaggacatgaaagtggttcagcctacaacacaacacaattggaatttgtgaaagactttgtttgtcgcaataaacaatggcgggaagcaatatttatttcaccttacaatgctatgaaccagagagcttaccgtatgcttggacttaatgttcaaacagtagattcttctcaaggttcagagtatgattatgtcatcttctgtgttactgcagattcgcagcatgcactgaatattaatagatttaatgtggcgcttacaagagctaagcgtggtatactagttgtcatgcgccagcgtgatgaattgtattctgctcttaagtttacagagctagatagtgaaacaagtctgcaaggtacaggtttgtttaaaatttgcaacaaagaatttagtggtgtccatcctgcttatgcagtcacaactaaggctcttgctgcaacctataaagttaatgatgaacttgctgcacttgttaatgtggaagctggttcagaaataacatataaacatcttatttctctgttaggattcaagatgagtgttaatgttgaaggctgccacaacatgtttataacacgtgatgaggcaatccgcaatgtaagaggttgggtaggttttgatgtagaagcaacacatgcttgtggcactaacattggtactaacctgccttttcaagtaggtttctctactggtgcagactttgtagtcacgcctgagggacttgtagatacttcaataggcaataattttgagcctgtgaattctaaagcacctccaggtgaacaatttaaccacttgagagtgttatttaaaagtgctaaaccttggcatgttataagaccaaggatagtgcagatgttagcagacaatctatgcaacgtttcagattgtgtagtgtttgtcacatggtgtcatggcctagaactaactactttgcgctattttgttaaaataggcaaggaacaagtttgttcttgtggttctagagctacaacttttaattctcatactcaagcttatgcttgttggaagcattgtttgggttttgattttgtttataacccacttctagtggatattcaacagtggggttactcgggtaacctacagtttaatcatgatttgcactgtaatgtgcatggccacgctcatgtagcttctgttgacgctataatgactcgttgtcttgcaattaacaatgcattttgtcaagatgtcaactgggatttgacataccctcacattgcaaatgaggatgaagtcaattctagttgtagatatctacaacgcatgtatcttaatgcgtgtgttgatgctcttaaagttaatgttgtctatgatataggcaaccctaaaggtattaaatgtgttaggcgtggggatgttaattttagattctatgataagaatccaatagtacgcaacgtcaagcagtttgagtatgactataatcagcacaaagataagtttgctgatggtctttgtatgttttggaattgtaatgtggattgttatcctgataattccttggtttgtaggtatgacacacgaaatttgagtgtgtttaacctaccaggctgtaatggtggtagtctgtacgttaacaaacatgcattctacacacctaaatttgaccgcattagcttccgcaatttgaaagctatgccattctttttttatgactcatcgccttgtgaaaccattcaagtggatggagttgcgcaagaccttgtgtctctagctacgaaagactgtatcacaaagtgcaacattggtggcgctgtttgtaagaaacatgcccagatgtatgcagaatttgtgacttcttacaatgcagctgtcacagctggctttactttctgggtaactaataaacttaacccttataacttatggaaaagtttttcagctctccagtctatcgacaatattgcttataatatgtataagggtggtcattatgatgctattgctggagaaatgcccactgtcataactggagacaaagtttttgttattgatcaaggtgtagaaaaggcagtttttgttaatcaaacaactctacctacatctgtggcgtttgagctatatgcaaagagaaatattcgcacactgccaaacaaccgtattttgaaaggtttaggtgtagacgtaaccaatggatttgtaatttgggattatgctaaccaaacaccattgtatcgtaataccgtcaaggtatgtgcatatacagatattgagccaaatggcctagtagttctgtatgatgatagatatggtgattaccagtcttttcttgctgctgataatgctgttctagtttctacacagtgttataagcgatattcatacgtagaaataccatctaatttgctcgttcagaatggtatgccattaaaagatggagcgaacctgtatgtttataagcgtgttaatggtgcgtttgttacactacctaacacaataaacacccagggtcgaagttatgaaacttttgaacctcgtagtgacattgagcgtgattttctcgctatgtcagaggagagttttgtagaaaggtatggtaaagacttaggcctacaacacatactgtatggtgaagttgataagccccaattaggtggtttacacactgttataggtatgtacagactcttacgtgcgaataagttgaacgcaaagtctgtaactaattcggattctgatgtcatgcaaaattactttgtattgtcggacaatggttcttacaagcaagtgtgtactgttgtggatttactgcttgatgatttcttagaacttcttagaaacatacttaaggagtatggtactaataagtcaaaagttgtaacagtgtcaattgattaccatagcataaattttatgacttggtttgaagatggcagtattaaaacatgttatccacagcttcaatcagcatggacgtgtggttataatatgcctgaactttataaagttcagaattgtgttatggaaccttgcaacattcctaattatggtgttggaataacgttgcctagcggtattcttatgaatgtggcaaagtatacacaactttgtcaatacctttcgaaaacaacaatttgtgtaccgcataacatgcgagtaatgcatttcggagcaggaagcgacaaaggagtggcgccaggtagtactgttcttaaacaatggctcccagaagggacactccttgtcgataatgatattgtagactatgtgtctgatgcacatgtttctgtgctttcagattgcaataaatataatacagagcacaagtttgatcttgtgatatctgatatgtatacagataatgattcaaaaagaaagcatgaaggcgtgatagccaataatggcaatgatgacgttttcatatatctctcaagttttcttcgtaacaatttggctctaggtggtagttttgctgtaaaagtgacagagacaagttggcacgaagttttatatgacattgcacaggattgtgcatggtggacaatgttttgtacagcagtgaatgcctcttcttcagaagcattcttgattggtgttaattatttgggtgcaagtgaaaaggttaaggttagtggaaaaacgctgcacgcaaattatatattttggaggaattgtaattatttacaaacctctgcttatagtatatttgacgttgctaagtttgatttgagattgaaagcaacgccagttgttaatttgaaaactgaacaaaagacagacttagtctttaatttaattaagtgtggtaagttactggtaagagatgttggtaacacctcttttactagtgactcttttgtgtgcactatgtagtgctgttttgtatgacagtagttcttacgtttactactaccaaagtgccttcagaccacctagtggttggcatttacaagggggtgcttatgcggtagttaacatttctagcgaatttaataatgcaggctcttcatcagggtgtactgttggtattattcatggtggtcgtgttgttaatgcttcttctatagctatgacggcaccgtcatcaggtatggcttggtctagcagtcagttttgtactgcacactgtaatttttcagatactacagtgtttgttacacattgttataaacatggtgggtgtcctttaactggcatgcttcaacagaatcttatacgtgtttctgctatgaaaaatggccagcttttctataatttaacagttagtgtagctaagtaccctacttttagatcatttcagtgtgttaataatttaacatccgtatatttaaatggtgatcttgtttacacctctaatgagaccatagatgttacatctgcaggtgtttattttaaagctggtggacctataacttataaagttatgagagaagttaaagccctggcttattttgttaatggtactgcacaagatgttattttgtgtgatggatcacctagaggcttgttagcatgccagtataatactggcaatttttcagatggcttttatccttttactaatagtagtttagttaagcagaagtttattgtctatcgtgaaaatagtgttaatactacttgtacgttacacaatttcatttttcataatgagactggcgccaaccctaatcctagtggtgttcagaatattcaaacttaccaaacaaaaacagctcagagtggttattataattttaatttttcctttctgagtagttttgtttataaggagtctaattttatgtatggatcttatcacccaagttgtaaatttagactagaaactattaataatggcttgtggtttaattcactttcagtttcaattgcttacggtcctcttcaaggtggttgcaagcaatctgtctttaaaggtagagcaacttgttgttatgcttattcatatggaggtccttcgctgtgtaaaggtgtttattcaggtgagttagatcataattttgaatgtggactgttagtttatgttactaagagcggtggctctcgtatacaaacagccactgaaccgccagttataactcaaaacaattataataatattactttaaatacttgtgttgattataatatatatggcagaactggccaaggttttattactaatgtgaccgactcagctgttagttataattatctagcagacgcaggtttggctattttagatacatctggttccatagacatctttgttgtacaaggtgaatatggtcttaattattataaggttaacccttgcgaagatgtcaaccagcagtttgtagtttctggtggtaaattagtaggtattcttacttcacgtaatgagactggttctcagcttcttgagaaccagttttacatcaaaatcactaatggaacacgtcgttttagacgttctattactgaaaatgttgcaaattgcccttatgttagttatggtaagttttgtataaaacctgatggctcaattgccacaatagtaccaaaacaattggaacagtttgtggcacctttatttaatgttactgaaaatgtgctcatacctaacagtttcaacttaactgttacagatgagtacatacaaacgcgtatggataaggtccaaattaattgcctgcagtatgtttgtggcagttctctggattgtagaaagttgtttcaacaatatgggcctgtttgcgacaacatattgtctgtagtaaatagtgttggtcaaaaagaagatatggaacttttgaatttctattcttctactaaaccggctggttttaatacaccagttcttagtaatgttagcactggtgagtttaatatttctcttctgttaacaaatcctagtagtcgtagaaagcgttctcttattgaagaccttctatttacaagcgttgaatctgttggactaccaacaaatgacgcatataaaaattgcactgcaggacctttaggcttttttaaggaccttgcgtgtgctcgtgaatataatggtttgcttgtgttgcctcctatcataacagcagaaatgcaagctttgtatactagttctctagtagcttctatggcttttggtggtattactgcagctggtgctataccttttgccacacaactgcaggctagaattaatcacttgggtattacccagtcacttttgttgaagaatcaagaaaaaattgctgcttcctttaataaggccattggtcatatgcaggaaggttttagaagtacatctctagcattacaacaaattcaagatgttgttagtaaacagagtgctattcttactgagactatggcatcacttaataaaaattttggtgctatttcttctgtgattcaagaaatctaccagcaatttgacgccatacaagcaaatgctcaagtggatcgtcttataactggtagattgtcatcactttctgttttagcatctgctaagcaggcggagtatattagagtgtcacaacagcgtgagttagctactcagaaaattaatgagtgtgttaagtcacagtctattaggtactccttttgtggtaatggacgacatgttctaaccataccgcaaaatgcacctaatggtatagtgtttatacacttttcttatactccagatagttttgttaatgttactgcaatagtgggtttttgtgtaaagccagctaatgctagtcagtatgcaatagtgcccgctaatggtaggggtatttttatacaagttaatggtagttactacatcactgcacgagatatgtatatgccaagagctattactgcaggagatgtagttacgcttacttcttgtcaagcaaattatgtaagtgtaaataagaccgtcattactacattcgtagacaatgatgattttgattttaatgacgaattgtcaaaatggtggaatgatactaagcatgagctaccagactttgacaaattcaattacacagtacctatacttgacattgatagtgaaattgatcgtattcaaggcgttatacagggtcttaatgactctctaatagaccttgaaaaactttcaatactcaaaacttatattaagtggccttggtatgtgtggttagccatagcttttgccactattatcttcatcttaatactaggatgggttttcttcatgactggttgttgtggttgttgttgtggatgctttggcattatgcctctaatgagtaagtgtggtaagaaatcttcttattacacgacttttgataacgatgtggtaactgaacaatacagacctaaaaagtctgtttgatgatccaaagtcccacgtccttcctaatagtattaattcttctttggtgtaaacttgtactaagttgttttagagagtttattatagcgctccaacaactaatacaagttttactccaaattatcaatagtaacttacagtctagactgaccctttggcacagtctagactaatgttaaacttagaagtaattattgaaactggtgagcaagtgattcaaaaaatcagtttcaatttacagcatatttcaagtgtattaaacacagaagtatttgatccctttgactattgttattacagaggaggtaatttttgggaaatagagtcagctgaagattgttcaggtgatgatgaatttattgaataagtcgctagaggagaatggaagttttctaacagcgctttacataattgtaggatttttagcactttatcttctaggtagagcacttcaagcatttgtacaggctgctgatgcttgttgtttattttggtatacatgggtagtaattccaggagctaagggtacagcctttgtatacaagtatacatatggtagaaaacttaacaatccggaattagaagcagttattgttaacgagtttcctaagaacggttggaataataaaaatccagcaaattttcaagatgcccaacgagacaaattgtactcttgactttgaacagtcagttcagctttttaaagagtataatttatttataactgcattcttgttgttcttaaccataatacttcagtatggctatgcaacaagaagtaaggttatttatacactgaaaatgatagtgttatggtgcttttggccccttaacattgcagtaggtgtaatttcatgtacatacccaccaaacacaggaggtcttgtcgcagcgataatacttacagtgtttgcgtgtctgtcttttgtaggttattggatccagagtattagactctttaagcggtgtaggtcatggtggtcatttaatccagaatctaatgccgtaggttcaatactcctaactaatggtcaacaatgtaattttgctatagagagtgtgccaatggtgctttctccaattataaagaatggtgttctttattgtgagggtcagtggcttgctaagtgtgaaccagaccacttgcctaaagatatatttgtttgtacaccggatagacgtaatatctaccgtatggtgcagaaatatactggtgaccaaagcggaaataagaaaaggtttgctacgtttgtctatgcaaagcagtcagtagatactggcgagctagaaagtgtagcaacaggaggaagtagtctttacacataaatgtgtgtgtgtagagagtatttaaaattattctttaatagcgcctctgttttaagagcgcataagagtatttattttgaggatactaatataaatcctctttgttttatactctcctttcaagagctattaacggtgttacctttcaagtagataatggaaaagtctactacgaaggaacaccagttttccaaaaaggttgttgtaggatgtggtccaattataagaaagaataattgaaccacctactacacttatttttataagaggtgttttacttaacaaaaacttaacaaatacggacgatgaaatggctgactagttttggaagagcagttatttcttgttataaatccctactattaactcaacttagagtgttagataggttaattttagatcacggactactacgcgttttaacgtgtagtaggcgcgtgcttttagttcaattagatttagtttataggttggcgtatacgcccacccaatcgctggcatgaataatagtaaagataatccttttcgcggagcaatagcaagaaaagctcgaatttatctgagagaaggattagattgtgtttactttcttaacaaagcaggacaagcagagccttgtcccgcgtgtacctctctagtattccaagggaaaacttgtgaggaacacatacataataataatcttttgtcatggcaagcggtaaagcagctggaaaaacagacgccccagcgccagtcattaaactaggaggaccaaaaccacctaaagtcggttcttctggaaatgcatcttggtttcaagcaataaaagccaagaagttaaatacacctccgcccaagtttgaaggtagcggtgttcctgataacgaaaacattaagccaagccagcaacatggatactggagacgccaagccaggtttaagccaggcaaaggtggaagaaaaccagtcccagatgcttggtacttttactatactggaacaggacctgccgctgacctgaactggggtgatactcaagatggtatagtgtgggttgctgctaagggtgctgatactaaatctagatccaatcagggtacaagagatcctgataagtttgaccaatacccactacgattctcggatggcggacctgatggtaatttccgttgggacttcattcccctgaaccgtggtaggagtggaagatcaacagcagcttcatcagcagcagctagtagagcaccatcacgtgaaggttcgcgtggtcgtagaagtgattctggagatgaccttattgctcgtgcagcaaagataatccaggatcagcagaaaaagggctctcgcattaccaaggcaaaggcagatgaaatggctcatcgccggtattgcaagcgcactatcccacctaattatagggttgatcaagtgtttggtccccgtactaaaggtaaggaggggaattttggtgatgacaagatgaatgaggaaggtattaaggatgggcgtgttacagcaatgctcaacctagtccctagcagccatgcttgtctttttggaagtagagtgacacccaaacttcaactagatgggcttcacttgagatttgaatttactactgtggtcccatgtgatgacccgcagtttgataattatgtgaaaatttgtgatcagtgtgtcgatggtgtaggaacgcgtccaaaagatgacgaaccaaaaccaaagtcacgctcaagttcaagacctgctacaagaggaaattctccagcgccaagacaacagcgcccaaagaaggagaaaaagctaaagaagcaggatgatgaagcagataaagcattgacctcagatgaggagaggaacaatgcacagctggaattttatgatgagcccaaggtaattaactggggggatgcagctctaggagagaatgaactttgagtaacataatggacctgttgtttcctggtacattttgttaaacactatttctgtgctttcctatcaattattacaggcattgattgtgattatgttcaatacttaagcttcttttggttgctttttgcttattgtattgttgctgtgctttttattgttgtgattctcattagtttgctttatcgtagaaattcaatagtaagagttaaggaagataggcatgtagcttgattacctacatgtctatcgccagggaaatgtctaatctgtctacttagtagcctggaaacgaacggtagacccttagattttaatttagtttaatttttagtttagtttaagttagtttagagtaggtataaagatgccagtgccggggccacgcggagtacgatcgagggtacagcactaggacgcccattaggggaagagctaaattttagtttaagttaagtttaattggctaagtatagttaaaatttataggctagtatagagttagagca

SEQ ID NO: 30059 - DNA, 31357 bp, Murine Hepatitis Virus
  misc_structure (13595)...(13683): Frameshift Site
  misc_structure (13595)...(13598): Slippery Site
  misc_structure (13608)...(13683): Pseudoknot
  misc_structure (13608)...(13617): Stem 1 up
  misc_structure (13624)...(13628): Stem 2 down
  misc_structure (13631)...(13640): Stem 1 down
  misc_structure (13674)...(13678): Stem 2 up
tataagagtgattggcgtccgtacgtaccctctcaactctaaaactcttgtagtttaaatctaatctaaactttataaacggcacttcctgcgtgtccatgcccgcgggcctggtcttgtcatagtgctgacatttgtagttccttgactttcgttctctgccagtgacgtgtccattcggcgccagcagcccacccataggttgcataatggcaaagatgggcaaatacggtctcggcttcaaatgggccccagaatttccatggatgcttccgaacgcatcggagaagttgggtaaccctgagaggtcagaggaggatgggttttgcccctctgctgcgcaagaaccgaaagttaaaggaaaaactttggttaatcacgtgagggtgaattgtagccggcttccagctttggaatgctgtgttcagtctgccataatccgtgatatttttgtagatgaggatccccagaaggtggaggcctcaactatgatggcattgcagttcggtagtgccgtcttggttaagccatccaagcgcttgtctattcaggcatggactaatttgggtgtgcttcccaaaacagctgccatggggttgttcaagcgcgtctgcctgtgtaacaccagggagtgctcttgtgacgcccacgtggcctttcacctttttacggtccaacccgatggtgtatgcctgggtaatggccgttttataggctggttcgttccagtcacagccataccggagtatgcgaagcagtggttgcaaccctggtccatccttcttcgtaagggtggtaacaaagggtctgtgacatccggccacttccgccgcgctgttaccatgcctgtgtatgactttaatgtagaggatgcttgtgaggaggttcatcttaacccgaagggtaagtactcctgcaaggcgtatgctcttcttaagggctatcgcggtgttaagcccatcctgtttgtggaccagtatggttgcgactatactggatgtctcgccaagggtcttgaggactatggcgatctcaccttgagtgagatgaaggagttgttccctgtgtggcgtgactccttggatagtgaagtccttgtggcttggcacgttgatcgagatcctcgggctgctatgcgtctgcagactcttgctactgtacgttgcattgattatgtgggccaaccgaccgaggatgtggtggatggagatgtggtagtgcgtgagcctgctcatcttctcgcagccaatgccattgttaaaagactcccccgtttggtggagactatgctgtatacggattcgtccgttacagaattctgttataaaaccaagctgtgtgaatgcggttttatcacgcagtttggctatgtggattgttgtggtgacacctgcgattttcgtgggtgggttgccggcaatatgatggatggctttccatgtccagggtgtaccaaaaattatatgccctgggaattggaggcccagtcatcaggtgttataccagaaggaggtgttctattcactcagagcactgatacagtgaatcgtgagtcctttaagctctacggtcatgctgttgtgccttttggttctgctgtgtattggagcccttgcccaggtatgtggcttccagtaatttggtcttctgttaagtcatactctggtttgacttatacaggagtagttggttgtaaggcaattgttcaagagacagacgctatatgtcgttctctgtatatggattatgtccagcacaagtgtggcaatctcgagcagagagctatccttggattggacgatgtctatcatagacagttgcttgtgaataggggtgactatagtctcctccttgagaatgtggatttgtttgttaagcggcgcgctgaatttgcttgcaaattcgccacctgtggagatggtcttgtacccctcctactagatggtttagtgccccgcagttattatttgattaagagtggtcaagctttcacctctatgatggttaattttagccatgaggtgactgacatgtgtatggacatggctttattgttcatgcatgatgttaaagtggccactaagtatgttaagaaggttactggcaaactggccgtgcgctttaaagcgttgggtgtagccgttgtcagaaaaattactgaatggtttgatttagccgtggacattgctgctagtgccgctggatggctttgctaccagctggtaaatggcttatttgcagtggccaatggtgttataacctttgtacaggaggtgcctgagcttgtcaagaattttgttgacaagttcaaggcatttttcaaggttttgatcgactctatgtcggtttctatcttgtctggacttactgttgtcaagactgcctcaaatagggtgtgtcttgctggcagtaaggtttatgaagttgtgcagaaatctttgtctgcatatgttatgcctgtgggttgcagtgaagccacttgtttggtgggtgagattgaacctgcagtttttgaagatgatgttgttgatgtggttaaagccccattaacatatcaaggctgttgtaagccacccacttctttcgagaagatttgtattgtggataaattgtatatggccaagtgtggtgatcaattttaccctgtggttgttgataacgacactgttggcgtgttagatcagtgctggaggtttccctgtgcgggcaagaaagtcgagtttaacgacaagcccaaagtcaggaagataccctccacccgtaagattaagatcaccttcgcactggatgcgacctttgatagtgttctttcgaaggcgtgttcagagtttgaagttgataaagatgttacattggatgagctgcttgatgttgtgcttgacgcagttgagagtacgctcagcccttgtaaggagcatgatgtgataggcacaaaagtttgtgctttacttgataggttggcaggagattatgtctatctttttgatgagggaggcgatgaagtgatcgccccgaggatgtattgttccttttctgctcctgatgatgaagactgcgttgcagcggatgttgtagatgcagatgaaaaccaagatgatgatgctgaagactcagcagtccttgtcgctgatacccaagaagaggacggcgttgccaaggggcaggttgaggcggattcggaaatttgcgttgcgcatactggtagtcaagaagaattggctgagcctgatgctgtcggatctcaaactcccatcgcctctgctgaggaaaccgaagtcggagaggcaagcgacagggaagggattgctgaggcgaaggcaactgtgtgtgctgatgctgtagatgcctgccccgatcaagtggaggcatttgaaattgaaaaggttgaagactctatcttggatgagcttcaaactgaacttaatgcgccagcggacaagacctatgaggatgtcttggcattcgatgccgtatgctcagaggcgttgtctgcattctatgctgtgccgagtgatgagacgcactttaaagtgtgtggattctattcgcctgctatagagcgcactaattgttggctgcgttctactttgatagtaatgcagagtctacctttggaatttaaagacttggagatgcaaaagctctggttgtcttacaaggccggctatgaccaatgctttgtggacaaactagttaagagcgtgcccaagtctattatccttccacaaggtggttatgtggcagattttgcctatttctttctaagccagtgtagctttaaagcttatgctaactggcgttgtttagagtgtgacatggagttaaagcttcaaggcttggacgccatgtttttctatggggacgttgtgtctcatatgtgcaagtgtggtaatagcatgaccttgttgtctgcagatataccctacactttgcattttggagtgcgagatgataagttttgcgctttttacacgccaagaaaggtctttagggctgcttgtgcggtagatgttaatgattgtcactctatggctgtagtagagggcaagcaaattgatggtaaagtggttaccaaatttattggtgacaaatttgattttatggtgggttacgggatgacatttagtatgtctccttttgaactcgcccagttatatggttcatgtataacaccaaatgtttgttttgttaaaggagatgttataaaggttgttcgcttagttaatgctgaagtcattgttaaccctgctaatgggcgtatggctcatggtgcaggtgttgcaggtgctatagctgaaaaggcgggcagtgcttttattaaagaaacctccgatatggtgaaggctcagggcgtttgccaggttggtgaatgctatgaatctgccggtggtaagttatgtaaaaaggtgcttaacattgtagggccagatgcgcgagggcatggcaagcaatgctattcacttttagagcgtgcttatcagcatattaataagtgtgacaatgttgtcactactttaatttcggctggtatatttagtgtgcctactgatgtctccctaacttacttacttggtgtagtgacaaagaatgtcattcttgtcagtaacaaccaggatgattttgatgtgatagagaagtgtcaggtgacctccgttgctggtaccaaagcgctatcacttcaattggccaaaaatttgtgccgtgatgtaaagtttgtgacgaatgcatgtagttcgctttttagtgaatcttgctttgtctcaagctatgatgtgttgcaggaagttgaagcgctgcgacatgatatacaattggatgatgatgctcgtgtctttgtgcaggctaatatggactgtctgcccacagactggcgtctcgttaacaaatttgatagtgttgatggtgttagaaccattaagtattttgaatgcccgggcgggatttttgtatccagccagggcaaaaagtttggttatgttcagaatggttcatttaaggaggcgagtgttagccaaataagggctttactcgctaataaggttgatgtcttgtgtactgttgatggtgttaacttccgctcctgctgcgtagcagagggtgaagtttttggcaagacattaggttcagtcttttgtgatggcataaatgtcaccaaagttaggtgtagtgccatttacaagggtaaggttttctttcagtacagtgatttgtccgaggcagatcttgtggctgttaaagatgcctttggttttgatgaaccacaactgctgaagtactacactatgcttggcatgtgtaagtggtcagtagttgtttgtggcaattattttgctttcaagcagtcaaataataattgctatataaatgtggcatgtttaatgctgcaacacttgagtttaaagtttcctaagtggcaatggcaagaggcttggaacgagttccgctctggtaaaccactaaggtttgtgtccttggtattagcaaagggcagctttaaatttaatgaaccttctgattctatcgattttatgcgtgtggtgctacgtgaagcagatttgagtggtgccacgtgcaatttggaatttgtttgtaaatgtggtgtgaagcaagagcagcgcaaaggtgttgacgctgttatgcattttggtacgttggataaaggtgatcttgtcaggggttataatatcgcatgtacgtgcggtagtaaacttgtgcattgcacccaatttaacgtaccatttttaatttgctccaacacaccagagggtaggaaactgcccgacgatgttgttgcagctaatatttttactggtggtagtgtgggccattacacgcatgtgaaatgtaaacccaagtaccagctttatgatgcttgtaatgttaataaggtttcggaggctaagggtaattttaccgattgcctctaccttaaaaatttaaagcaaactttttcgtctgtgctgacgactttttatttagatgatgtaaagtgtgtggagtataagccagatttatcgcagtattactgtgagtctggtaaatattatacaaaacccattattaaggcccaatttagaacatttgagaaggttgatggtgtctataccaactttaaattggtgggacatagtattgctgaaaaactcaatgctaagctgggatttgattgtaattctccctttgtggagtataaaattacagagtggccaacagctactggagatgtggtgttggctagtgatgatttgtatgtaagtcggtactcaagcgggtgcattacttttggtaaaccggttgtctggcttggccatgaggaagcatcgctgaaatctctcacatattttaatagacctagtgtcgtttgtgaaaataaatttaatgtgttgcccgttgatgtcagtgaacccacggacaaggggcctgtgcctgctgcagtccttgttaccggcgtccctggagctgatgcgtcagctggtgccggtattgccaaggagcaaaaagcctgtgcttctgctagtgtggaggatcaggttgttacggaggttcgtcaagagccatctgtttcagctgctgatgtcaaagaggttaaattgaatggtgttaaaaagcctgttaaggtggaaggtagtgtggttgttaatgatcccactagcgaaaccaaagttgttaaaagtttgtctattgttgatgtctatgatatgttcctgacagggtgtaagtatgtggtttggactgctaatgagttgtctcgactagtaaattcaccgactgttagggagtatgtgaagtggggtaagggaaagattgtaacacccgctaagttgttgttgttaagagatgagaagcaagagttcgtagcgccaaaagtagtcaaggcgaaagctattgcctgctattgtgctgtgaagtggtttctcctctattgttttagttggataaagtttaatactgataataaggttatatacaccacagaagtagcttcaaagcttactttcaagttgtgctgtttggcctttaagaatgccttacagacgtttaattggagcgttgtgtctaggggctttttcctagttgcaacggtctttttattatggtttaactttttgtatgctaatgttattttgagtgacttctatttgcctaatattgggcctctccctacgtttgtgggacagatagttgcgtggtttaagactacatttggtgtgtcaaccatctgtgatttctaccaggtgacggatttgggctatagaagttcgttttgtaatggaagtatggtatgtgaactatgcttctcaggttttgatatgctggacaactatgatgctataaatgttgttcaacacgttgtagataggcgtttgtcctttgactatattagcctatttaaattagtagttgagcttgtaatcggctactctctttatactgtgtgcttctacccactgtttgtccttattggaatgcagttgttgaccacatggttgcctgaattctttatgctggagactatgcattggagtgctcgtttgtttgtgtttgttgccaatatgcttccagcttttacgttactgcgattttacatcgtggtgacagctatgtataaggtctattgtctttgtagacatgttatgtatggatgtagtaagcctggttgcttgttttgttataagagaaaccgtagtgtccgtgttaagtgtagcaccgttgttggtggttcactacgctattacgatgtaatggctaacggcggcacaggtttctgtacaaagcaccagtggaactgtcttaattgcaattcctggaaaccaggcaatacattcataactcatgaagcagcggcggacctctctaaggagttgaaacgccctgtgaatccaacagattctgcttattactcggtcacagaggttaagcaggttggttgttccatgcgtttgttctacgagagagatggacagcgtgtttatgatgatgttaatgctagtttgtttgtggacatgaatggtctgctgcattctaaagttaaaggtgtgcctgaaacgcatgttgtggttgttgagaatgaagctgataaagctggttttctcggcgccgcagtgttttatgcacaatcgctctacagacctatgttgatggtggaaaagaaattaataactaccgccaacactggtttgtctgttagtcgaactatgtttgacctttatgtagattcattgctgaacgtcctcgacgtggatcgcaagagtctaacaagttttgtaaatgctgcgcacaactctctaaaggagggtgttcagcttgaacaagttatggatacctttattggctgtgcccgacgtaagtgtgctatagattctgatgttgaaaccaagtctattaccaagtccgtcatgtcggcagtaaatgctggcgttgattttacggatgagagttgtaataacttggtgcctacctatgttaaaagtgacactatcgttgcagccgatttgggtgttcttattcagaataatgctaagcatgtacaggctaatgttgctaaagccgctaatgtggcttgcatttggtctgtggatgcttttaaccagctatctgctgacttacagcataggctgcgaaaagcatgttcaaaaactggcttgaagattaagcttacttataataagcaggaggcaaatgttcctattttaactacaccgttctctcttaaagggggcgctgtttttagtagaatgttacaatggttgtttgttgctaatttgatttgtttcattgtgttgtgggcccttatgccaacatatgcagtgcacaaatcggatatgcagttgcctttatatgccagttttaaagttatagataatggtgtgctaagggatgtgtctgttactgacgcatgcttcgcaaacaaatttaatcaatttgatcaatggtatgagtctacttttggtcttgcttattaccgcaactctaaggcttgtcctgttgtggttgctgtaatagatcaagacattggccataccttatttaatgttcctaccacagttttaagatatggatttcatgtgttgcattttataacccatgcatttgctactgatagcgtgcagtgttacacgccacatatgcaaatcccctatgataatttctatgctagtggttgcgtgttgtcatccctctgtactatgcttgcgcatgcagatggaaccccgcatccttattgttatacagggggtgttatgcacaatgcctctctgtatagttctttggctcctcatgtccgttataacctggctagttcaaatggttatatacgttttcccgaagtggttagtgaaggcattgtgcgtgttgtgcgcactcgctctatgacctactgcagggttggtttatgtgaggaggccgaggagggtatctgctttaattttaatcgttcatgggtattgaacaacccgtattatagggccatgcctggaactttttgtggtaggaatgcttttgatttaatacatcaagttttaggaggattagtgcggcctattgatttctttgccttaacggcgagttcagtggctggtgctatccttgcaattattgtcgttttggctttctattatttaataaagcttaaacgtgcctttggtgactacactagtgttgtggttatcaatgtaattgtgtggtgtataaattttctgatgctttttgtgtttcaggtttatcccacattgtcttgtttatatgcttgtttttatttctacacaacgctttatttcccttcggagataagtgttgttatgcatttgcaatggcttgtcatgtatggtgctattatgcccttgtggttttgcattatttacgtggcagtcgttgtttcaaaccatgcattgtggttgttctcttactgccgcaaaattggtaccgaggttcgtagtgacggcacatttgaggaaatggcccttactacctttatgattactaaagaatcttattgtaagttgaaaaattctgtttctgatgttgcttttaacaggtacttgagtctttataacaagtatcgttattttagtggcaaaatggatactgccgcttatagagaggctgcctgttcacaactggcaaaggcaatggaaacatttaaccataataatggtaatgatgttctctatcagcctccaaccgcctctgttactacatcatttttacagtctggtatagtgaagatggtgtcgcccacctctaaagtggagccttgtattgttagtgttacttatggtaacatgacacttaatgggttgtggttggatgataaagtttattgcccaagacatgttatctgttcttcagctgacatgacagaccctgattatcctaatttgctttgtagagtgacatcaagtgatttttgtgttatgtctggtcgtatgagccttactgtaatgtcttatcaaatgcagggctgccaacttgttttgactgttacactgcaaaatcctaacacgcctaagtattccttcggtgttgttaagcctggtgagacatttactgtactggctgcatacaatggcagacctcaaggagccttccatgttacgcttcgtagtagccataccataaagggctcctttctatgtggatcctgcggttctgtaggatatgttttaactggcgatagtgtacgatttgtttatatgcatcagctagagttgagtactggttgtcataccggtactgactttagtgggaacttttatggtccctatagagatgcgcaagttgtacaattgcctgttcaggattatacgcagactgttaatgttgtagcttggctttatgctgctatttttaacagatgcaactggtttgtgcaaagtgatagttgttccctggaggagtttaatgtttgggctatgaccaatggttttagctcaatcaaagccgatcttgtcttggatgcgcttgcttctatgacaggcgttacagttgaacaggtgttggccgctattaagaggctgcattctggattccagggcaaacaaattttaggtagttgtgtgcttgaagatgagctgacaccaagtgatgtttatcaacaactagctggtgtcaagctacagtcaaagcgcacaagagttataaaaggtacatgttgctggatattggcttcaacgtttttgttctgtagcattatctcagcatttgtaaaatggactatgtttatgtatgttactacccatatgttgggagtgacattgtgtgcactttgttttgtaagctttgctatgttgttgatcaagcataagcatttgtatttaactatgtatattatgcctgtgttatgcacactgttttacaccaactatttggttgtgtacaaacagagttttagaggtctagcttatgcttggctttcacactttgtccctgctgtagattatacatatatggatgaagttttatatggtgttgtgttgctagtagctatggtgtttgttaccatgcgtagcataaaccacgacgtcttttctattatgttcttggttggtagacttgtcagcctggtatccatgtggtattttggagccaatttagaggaagaggtactattgttcctcacatccctatttggcacgtacacatggactactatgttgtcattggctaccgctaaggttattgctaaatggttggctgtgaatgtcttgtacttcacagacgtaccgcaaattaaattagttcttttgagctacttgtgtattggttatgtgtgttgttgttattggggaatcttgtcactccttaatagcatttttaggatgccattgggcgtctacaattataaaatctccgttcaggagttacgttatatgaatgctaatggcttgcgcccacctagaaatagttttgaggccctgatgcttaattttaagctgttgggaattggtggtgtgccagtcattgaagtatctcaaattcaatcaagattgacggatgttaaatgtgctaatgttgtgttgcttaattgcctccagcacttgcatattgcatctaattctaagttgtggcagtattgtagtactttgcacaatgaaatactggctacatctgatttgagcgtggccttcgataagttggctcagctcttagttgttttatttgctaatccagcagcagtggatagcaagtgccttgcaagtattgaagaagtgagcgatgattacgttcgcgacaatactgtcttgcaagccttacagagtgaatttgttaatatggctagcttcgttgagtatgaacttgctaagaagaatctagatgaggctaaggctagcggctctgccaatcaacagcagattaagcagctagagaaggcgtgtaatattgctaagtcagcatatgagcgcgacagagctgttgctcgtaagctggaacgtatggctgatttagctcttacaaacatgtataaagaagctagaattaatgataagaagagtaaggtagtgtctgcattgcaaaccatgctctttagtatggtgcgtaagctagataaccaagctcttaattctattttagataatgcagttaagggttgtgtacctttgaatgcaataccatcattgacttcgaacactctgactataatagtgccagataagcaggtttttgatcaggttgtggataatgtgtatgtcacctatgctgggaatgtatggcatatacagtttattcaagatgctgatggtgctgttaaacaattgaatgagatagatgttaattcaacctggcctctagtcattgctgcaaataggcataatgaagtgtctactgttgttttgcagaacaatgagttgatgcctcagaagttgagaactcaggttgtcaatagtggctcagatatgaattgtaatactcctacccagtgttactataatactactggcacgggtaagattgtgtatgctatacttagtgactgtgatggtctcaagtacactaagatagtaaaagaagatggaaattgtgttgttttggaattggatcctccctgtaagttttctgttcaggatgtgaagggccttaaaattaagtacctttactttgtgaaggggtgtaatacactggctagaggctgggttgtaggcaccttatcctcgacagtgagattgcaggcgggtacggcaactgagtatgcctccaactctgcaatactgtcgctgtgtgcgttttctgtagatcctaagaaaacgtacttggattatataaaacagggtggagttcccgttactaattgtgttaagatgttatgtgaccatgctggcactggtatggccattactattaagccggaggcaaccactaatcaggattcttatggtggtgcttccgtttgtatatattgccgctcgcgtgttgaacatccagatgttgatggattgtgcaaattacgcggcaagtttgtccaagtgcccttaggcataaaagatcctgtgtcatatgtgttgacgcatgatgtttgtcaggtttgtggcttttggcgagatggtagctgttcctgtgtaggcacaggctcccagtttcagtcaaaagacacgaactttttaaacgggttcggggtacaagtgtaaatgcccgtcttgtaccctgtgccagtggcttggacactgatgttcaattaagggcatttgacatttgtaatgctaatcgagctggcattggtttgtattataaagtgaattgctgccgcttccagcgtgtagatgaggacggcaacaagttggataagttctttgttgttaaaagaactaatttagaagtgtataataaggagaaagaatgctatgagttgacaaaagaatgcggtgttgtggctgaacacgagttcttcacatttgatgtggagggaagtcgggtaccacacatagtccgtaaagatctttcaaagtttactatgttagatctttgctatgcattgcgtcattttgaccgcaatgattgttcaactcttaaggaaattctccttacatatgctgagtgtgaagagtcctacttccaaaagaaggactggtatgattttgttgagaatcctgatataattaatgtgtataaaaagcttggtcctatatttaatagagccctgcttaacactgccaagtttgcagacgcattagtggaggcaggcttagtaggtgttttaacacttgataatcaagatttatatggtcaatggtatgactttggagattttgtcaagacagtacctggttgtggtgttgccgtggcagactcttattattcatatatgatgccaatgctgactatgtgtcatgcgttggatagtgagttgtttgttaatggtacttatagggagtttgaccttgttcagtatgattttactgatttcaagctagagctcttcactaagtattttaagcattggagtatgacctaccacccgaacacctgtgagtgcgaggatgacaggtgcattattcattgcgccaattttaatatactttttagtatggtcttacctaagacctgttttgggcctcttgttaggcagatatttgtggatggtgttcctttcgttgtgtcgatcggttaccattataaagaattaggtgttgttatgaatatggatgtggatacacatcgttatcgcttgtctcttaaggacttgcttttgtatgctgcagaccctgcccttcatgtggcgtctgctagtgcactgcttgatttgcgcacatgttgttttagcgttgcagctattacaagtggcgtaaaatttcaaacagttaaacctggaaattttaatcaggatttttatgagtttattttgagtaaaggcctgcttaaagaggggagctccgttgatttgaagcacttcttctttacgcaggatggtaatgctgctattactgattataattattacaagtataatctacccaccatggtggatattaagcagttgttgtttgttttagaagttgttaataagtattttgagatctatgagggtgggtgtatacccgcaacacaggtcattgttaataattatgataagagtgctggctatccatttaataaatttggaaaggccaggctctattatgaggcattatcatttgaggagcaggatgaaatttatgcgtataccaaacgcaatgtcctgccgaccctaactcaaatgaatcttaaatatgctattagtgctaagaatagggcccgcaccgttgctggtgtctctattctcagtactatgactggcagaatgtttcatcaaaagtgtctaaagagtatagcagctactcgcggtgttcctgtagttataggcaccacgaagttctatggcggttgggatgatatgttacgccgccttattaaagatgttgatagtcctgtactcatgggttgggactatcctaaatgtgatcgtgctatgccaaacatactgcgtattgttagtagtttggtgctagcccgtaaacatgattcgtgctgttcgcatacggatagattctatcgtcttgcgaacgagtgcgcccaagttttgagtgaaattgttatgtgtggtggttgttattatgttaaaccaggtggcactagtagtggggatgcaaccactgcttttgctaattctgtgtttaacatttgtcaagctgtttccgccaatgtatgctcgcttatggcatgcaatggacacaaaattgaagatttgagtatacgcgagttacaaaagcgcctatactctaatgtctatcgtgcggaccatgttgaccccgcatttgttagtgagtattatgagtttttaaataagcattttagtatgatgattttgagtgatgatggtgttgtgtgttataattcagagtttgcgtccaagggttatattgctaatataagtgcctttcaacaggtattatattatcaaaataatgtgtttatgtctgaggccaaatgttgggtagaaacagacatcgaaaagggaccgcatgaattttgttctcaacatacaatgctagtcaagatggatggtgatgaagtctaccttccataccctgatccttcgagaatcttaggagcaggctgttttgttgatgatttattaaagactgatagcgttctcttgatagagcgtttcgtaagtcttgcaattgatgcttatcctttagtataccatgagaacccagagtatcaaaatgtgttccgggtatatttagaatatataaagaagctgtacaatgatctcggtaatcagatcctggacagctacagtgttattttaagtacttgtgatggtcaaaagtttactgatgagaccttttacaagaacatgtatttaagaagtgcagtgctgcaaagcgttggtgcctgcgttgtctgtagttctcaaacatcattacgttgtggcagttgcatacgcaagcctttgctgtgttgcaaatgcgcctatgatcatgttatgtccactgatcataaatatgtcctgagtgtgtcaccatatgtgtgtaattcaccgggatgtgatgtaaatgatgttaccaaattgtatttaggtggtatgtcatattattgtgaggaccataaaccacagtattcattcaaattggtgatgaatggtatggtttttggtttatataaacaatcttgtactggttcgccctacatagaggattttaataaaatagctagttgcaaatggacagaagtcgatgattatgtgctagctaatgaatgcaccgaacgccttaaattgtttgccgcagaaacgcagaaggccacagaagaggcctttaagcaatgttatgcgtcagcaacgatccgtgagatcgtgagcgatcgggagttaattttatcttgggaaattggtaaagtgagaccaccacttaataaaaattatgtttttactggctaccattttactaataatggtaagacagttttaggtgagtatgtttttgataagagtgagttgactaatggtgtgtactatcgcgccacaaccacttataagttatctgtaggtgatgtgttcattttaacatcacacgcagtgtctagtttaagtgctcctacattagtaccgcaggagaattatactagcattcgttttgctagtgtttatagtgtgcctgagacgtttcagaataatgtgcctaattatcagcacattggaatgaagcgctattgtactgtacagggaccgcctggtactggtaagtcccatctagccattgggctagctgtttattattgtacagcgcgcgtggtgtataccgctgctagccatgctgcagttgacgcgctgtgtgaaaaggcacataaatttttaaatattaatgactgcacgcgtattgttcctgcaaaggtgcgtgtagattgttatgataaatttaaggtcaatgacaccactcgcaagtatgtgtttactacaataaatgcattacctgagttggtgactgacattattgtcgttgatgaagttagtatgcttaccaactatgagctgtctgttattaacagtcgtgttagtgctaagcattatgtgtatattggagaccctgcgcagttacctgcaccacgtgtgctactgaataagggaactctagaacctagatattttaattccgttaccaagctaatgtgttgtttgggtccagatattttcttgggcacctgttatagatgccctaaggagattgtggatacggtgtcagccttggtttataataataagctgaaggctaaaaatgataatagctccatgtgctttaaggtttattataagggccagactacacatgagagttctagtgctgttaatatgcagcaaatacatttaattagtaagtttttaaaggcaaaccccagttggagtaacgccgtatttattagtccttataatagtcagaactatgttgctaagagagtcttgggattacaaacccagacagtagactcagcgcagggttctgaatatgattttgttatttattcacagactgcggaaacagcgcattctgtcaatgtaaatagattcaatgttgctattacacgtgctaagaagggtattctctgtgtcatgagtagtatgcaattatttgagtctcttaattttactacactgacgttggataagattaacaatccacgattacagtgtactacaaatttgtttaaggattgtagcaggagctatgtaggatatcacccagcccatgcaccatcctttttggcagttgatgacaaatataaggtaggcggtgatttagccgtttgccttaatgttgctgattctgctgtcacttattcgcggcttatatcactcatgggattcaagcttgacttgacccttgatggttattgtaagctgtttataactagagatgaagctatcaaacgtgttagagcctgggttggcttcgatgcagaaggtgcccatgcgatacgtgatagcattgggacaaatttcccattacaattaggcttttcgactggaattgattttgttgtcgaagccactggaatgtttgctgagagagatggttatgtctttaaaaaggcagccgcacgagctcctcctggcgaacaatttaaacaccttatcccacttatgtcaagagggcagaaatgggatgtggttcgaattagaatagtacaaatgttgtcagaccacctagcggatttggcagacagtgttgtacttgtgacgtgggctgccagctttgagctcacatgtttgcgatatttcgctaaagttggaagagaagttgtgtgtagtgtctgcaccaagcgtgcgacatgttttaattctagaactggatactatggatgctggcgacatagttattcctgtgattacctgtacaacccactaatagttgacattcaacagtggggatatacaggatctttaactagcaatcatgatcctatttgcagcgtgcataagggtgctcatgttgcatcatctgatgctatcatgacccggtgtctagctgttcatgattgcttttgtaagtctgttaattggaatttagaataccccattatttcaaatgaggtcagtgttaatacctcctgcaggttattgcagcgcgtaatgtttagggctgcgatgctatgcaataggtatgatgtgtgttatgacattggcaaccctaaaggtcttgcctgtgtcaaaggatatgattttaagttttatgatgcctcccctgttgttaagtctgttaaacagtttgtttataaatacgaggcacataaagatcaatttttagatggtttgtgtatgttttggaactgcaatgtggataagtatccagcgaatgcagttgtgtgtaggtttgacacgcgtgtgttgaacaaattaaatctccctggctgtaatggtggcagtttgtatgttaacaaacatgcattccacaccagtccctttacccgggctgccttcgagaatttgaagcctatgcctttcttttattattcagatacgccctgtgtgtatatggaaggcatggaatctaagcaggtcgattatgtcccattgagaagcgctacatgcatcacaagatgcaatttaggtggcgctgtttgtttaaaacatgctgaggagtatcgtgagtaccttgagtcttacaatacggcaaccacagcgggttttactttttgggtctataagacttttgatttttataacctttggaatacttttactaggctccaaagtttagaaaatgtagtgtataatttggtcaatgctggacactttgatggccgggcgggtgaactgccttgtgctgttataggtgagaaagtcattgccaagattcaaaatgaggatgtcgtggtctttaaaaataacacgccattccccactaatgtggctgtcgaattatttgctaagcgcagtattcggccccaccccgagcttaagctctttagaaatttgaatattgacgtgtgctggagtcacgtcctttgggattatgctaaggatagtgtgttttgcagttcgacgtataaggtctgcaaatacacagatttacagtgcattgaaagcttgaatgtactttttgatggtcgtgataatggtgctcttgaagcttttaagaagtgccggaatggcgtctacattaacacgacaaaaattaaaagtctgtcgatgattaaaggcccacaacgtgccgatttgaatggcgtagttgtggagaaagttggagattctgatgtggaattttggtttgctgtgcgtaaagacggtgacgatgttatcttcagccgtacagggagccttgaaccgagccattaccggagcccacaaggtaatccgggtggtaatcgcgtgggtgatctcagcggtaatgaagctctagcgcgtggcactatctttactcaaagcagattattatcttctttcacacctcgatcagagatggagaaagattttatggatttagatgatgatgtgttcattgcaaaatatagtttacaggactacgcgtttgaacacgttgtttatggtagttttaaccagaagattattggaggtttgcatttgcttattggcttagcccgtaggcagcaaaaatccaatctggtaattcaagagttcgtgacatacgactctagcattcattcgtactttatcactgacgagaacagtggtagtagtaagagtgtgtgcactgttattgatttattgttagatgattttgtggacattgtaaagtccctgaatctaaagtgtgtgagtaaggttgttaatgttaatgttgattttaaagatttccagtttatgttgtggtgcaatgaggagaaggtcatgactttctatcctcgtttgcaggctgctgctgactggaaacctggttatgttatgcctgtcttatataagtatttggaatcgcctctggaaagagtaaacctctggaattatggcaagccgattactttacctacaggatgtatgatgaatgttgctaagtatactcaattatgtcaatatttgagcactacaacattagcagttccggctaatatgcgtgtcttacaccttggtgccggttcggataagggtgttgcccctgggtctgcagttcttaggcagtggctaccagcgggaagtattcttgtagataatgatgtgaatccatttgtgagtgacagtgtcgcctcatattatggaaattgtataaccttaccctttgattgtcagtgggatctgataatttctgatatgtacgaccctcttactaagaacattggggagtacaacgtgagtaaagatggattctttacttacctctgtcatttaattcgtgacaagttggctctgggtggcagtgttgccataaaaataacagagttttcttggaacgctgagttatatagtttaatggggaagtttgcgttctggacaatcttttgcaccaacgtaaacgcctcttcaagtgaaggatttttgattggcataaattggttgaataagacccgtaccgaaattgacggtaaaaccatgcatgccaattatctgttttggagaaatagtacaatgtggaatggaggggcttacagtctctttgacatgagtaagttccctttgaaagcggctggtacggctgttgttagccttaaaccagaccaaataaatgacttagtcctctccttgattgagaagggcaagttattagtgcgtgatacacgcaaagaagtttttgttggcgatagcctagtaaatgtcaaataaatctatacttgtcgtggctgtgaaaatggcctttgctgacaagcctaatcatttcataaactttcccctggcccaatttagtggctttatgggtaagtatttaaagctacagtctcaacttgtggaaatgggtttagactgtaaattacagaaggcaccacatgttagtattaccctgcttgatattaaagcagaccaatacaaacaggtggaatttgcaatacaagaaataatagatgatctggcggcatatgagggagatattgtctttgacaaccctcacatgcttggcagatgccttgttcttgatgttagaggatttgaagagttgcatgaagatattgttgaaattctccgcagaaggggttgcacggcagatcaatccagacactggattccgcactgcactgtggcccaatttgacgaagaaagagaaacaaaaggaatgcaattctatcataaagaacccttctacctcaagcataacaacctattaacggatgctgggcttgagctcgtgaagataggttcttccaaaatagatgggttttattgtagtgaactgagtgtttggtgtggtgagaggctttgttataagcctccaacacccaaattcagtgatatatttggctattgctgcatagataaaatacgtggtgatttagaaataggagacctaccgcaggatgatgaggaagcgtgggccgagctaagttaccactatcaaagaaacacctacttcttcagacatgtgcacgataatagcatctattttcgtaccgtgtgtagaatgaagggttgtatgtgttgatttgtttttacactattagtgtaataagcttattattttgttgaaaagggcaggatgtgcatagctatggctcctcgcacactgcttttgctgatttgatgtcagctggtgtttgggttcaatgaacctcttaacatcgtttcacatttaaatgatgactggtttctatttggtgacagtcgttctgactgtacctatgtagaaaataacggtcatcctaaattagattggcttgacctcgacccaaagttgtgtaattcaggaaagatttccgcaaagagtggtaactctctctttaggagttttcacttcactgatttttacaattatacgggtgagggagaccaaattgtattttatgaaggagttaattttagtcccagccatggctttaaatgcctggctcatggagataataaaagatggatgggcaataaagctcgattttatgcccgagtgtatgagaagatggcccaatataggagcctatcgtttgttaatgtgtcttatgcctatggaggtaatgcaaagcccgcctccatttgcaaagacaatactttaacactcaataaccccaccttcatatcgaaggagtctaattatgttgattattactatgagagtgaggctaatttcacactagaaggttgtgatgaatttatagtaccgctctgtggttttaatggccattccaagggcagctcttcggatgctgccaataaatattatactgactctcagagttactataatatggatattggtgtcttatatgggttcaattcgaccttggatgttggcaacactgctaaggatccgggtcttgatctcacttgcaggtatcttgcattgactcctggtaattataaggctgtgtccttagaatatttgttaagcttaccctcaaaggctatttgcctccataagacaaagcgctttatgcctgtgcaggtagttgactcaaggtggagtagcatccgccagtcagacaatatgaccgctgcagcctgtcagctgccatattgtttctttcgcaacacatctgcgaattatagtggtggcacacatgatgcgcaccatggtgattttcatttcaggcagttattgtctggtttgttatataatgtttcctgtattgcccagcagggtgcatttctttataataatgttagttcctcttggccagcctatgggtacggtcattgtccaacggcagctaacattggttatatggcacctgtttgtatctatgaccctctcccggtcatactgctaggtgtgttattgggtatagctgtgttgattattgtgtttttgatgttttattttatgacggatagcggtgttagattgcatgaggcataatctaaacatgctgttcgtgtttattctatttttgccctcttgtttagggtatattggtgattttagatgtatccagcttgtgaattcaaacggtgctaatgttagtgctccaagcattagcactgagaccgttgaagtttcacaaggcctggggacatattatgtgttagatcgagtttatttaaatgccacattattgcttactggttactacccggtcgatggttctaagtttagaaacctcgctcttacgggaactaactcagttagcttgtcgtggtttcaaccaccctatttaagtcagtttaatgatggcatatttgcgaaggtgcagaaccttaagacaagtacgccatcaggtgcaactgcatattttcctactatagttataggtagtttgtttggctatacttcctataccgttgtaatagagccatataatggtgttataatggcctcagtgtgccagtataccatttgtctgttaccttacactgattgtaagcctaacactaatggtaataagcttatagggttttggcacacggatgtaaaacccccaatttgtgtgttaaagcgaaatttcacgcttaatgttaatgctgatgcattttattttcatttttaccaacatggtggtactttttatgcgtactatgcggataaaccctccgctactacgtttttgtttagtgtatatattggcgatattttaacacagtattatgtgttacctttcatctgcaacccaacagctggtagcacttttgctccgcgctattgggttacacctttggttaagcgccaatatttgtttaatttcaaccagaagggtgtcattactagtgctgttgattgtgctagtagttataccagtgaaataaaatgtaagacccagagcatgttacctagcactggtgtctatgagttatccggttatacggtccaaccagttggagttgtataccggcgtgttgctaacctcccagcttgtaatatagaggagtggcttactgctaggtcagtcccctcccctctcaactgggagcgtaagacttttcagaattgtaattttaatttaagcagcctgttacgttatgttcaggctgagagtttgttttgtaataatatcgatgcttccaaagtgtatggcaggtgctttggtagtatttcagttgataagtttgctgtaccccgaagtaggcaagttgatttacagcttggtaactctggatttctgcagactgctaattataagattgatacagctgccacttcgtgtcagctgcattacaccttgcctaagaataatgtcaccataaacaaccataacccctcgtcttggaataggaggtatggctttaatgatgctggcgtctttggcaaaaaccaacatgacgttgtttacgctcagcaatgttttactgtaagatctagttattgcccgtgtgctcaaccggacatagttagcccttgcactactcagactaagcctaagtctgcttttgttaatgtgggtgaccattgtgaaggcttaggtgttttagaagataattgtggcaatgctgatccacataagggttgtatctgtgccaacaattcatttattggatggtcacatgatacctgccttgttaatgatcgctgccaaatttttgctaatatattgttaaatggcattaatagtggtaccacatgttccacagatttgcagttgcctaatactgaagtggttactggcatttgtgtcaaatatgacctctacggtattactggacaaggtgtttttaaagaggttaaggctgactattataatagctggcaaacccttctgtatgatgttaatggtaatttgaatggttttcgtgatcttaccactaacaagacttatacgataaggagctgttatagtggccgtgtttctgctgcatttcataaagatgcacccgaaccggctctgctctatcgtaatataaattgtagctatgtttttagcaataatatttcccgtgaggagaacccacttaattactttgatagttatttgggttgtgttgttaatgctgataaccgcacggatgaggcgcttcctaattgtgatctccgtatgggtgctggcttatgcgttgattattcaaaatcacgcagggctgaccgatcagtttctactggctatcggttaactacatttgagccatacactccgatgttagttaatgatagtgtccaatccgttgatggattatatgagatgcaaataccaaccaattttactattgggcaccatgaggagttcattcaaactagatctccaaaggtgactatagattgtgctgcatttgtctgtggtgataacactgcatgcaggcagcagttggttgagtatggctctttctgtgttaatgttaatgccattcttaatgaggttaataacctcttggataatatgcaactacaagttgctagtgcattaatgcagggtgttactataagctcgagactgccagacggcatctcaggccctatagatgacattaattttagtcctctacttggatgcataggttcaacatgtgctgaagacggcaatggacctagtgcaatccgagggcgttctgctatagaggatttgttatttgacaaggtcaaattatctgatgttggctttgtcgaggcttataataattgcaccggtggtcaagaagttcgtgacctcctttgtgtacaatcttttaatggcatcaaagtattacctcctgtgttgtcagagagtcagatctctggctacacaaccggtgctactgcggcagctatgttcccaccgtggtcagcagctgccggtgtgccatttagtttaagtgttcaatatagaattaatggtttaggtgtcactatgaatgtgcttagtgagaaccaaaagatgattgctagtgcttttaacaatgcgctgggtgctatccaggatgggtttgatgcaaccaattctgctttaggtaagatccagtccgttgttaatgcaaatgctgaagcactcaataacttactaaatcaactttctaacaggtttggtgctattagtgcttctttacaagaaattctaactcggcttgaggctgtagaagcaaaagcccagatagatcgtcttattaatggcaggttaactgcacttaatgcgtatatatccaagcaacttagtgatagtacgcttattaaagttagtgctgctcaggccatagaaaaggtcaatgagtgcgttaagagccaaaccacgcgtattaatttctgtggcaatggtaatcatatattatctcttgtccagaatgcgccttatggcttatattttatacacttcagctatgtgccaatatcctttacaaccgcaaatgtgagtcctggactttgcatttctggtgatagaggattagcacctaaagctggatattttgttcaagatgatggagaatggaagttcacaggcagttcatattactaccctgaacccattacagataaaaacagtgtcattatgagtagttgcgcagtaaactacacaaaggcacctgaagttttcttgaacacttcaatacctaatccacccgactttaaggaggagttagataaatggtttaagaatcagacgtctattgcgcctgatttatctctcgatttcgagaagttaaatgttactttgctggacctgacgtatgagatgaacaggattcaggatgcaattaagaagttaaatgagagctacatcaacctcaaggaagttggcacatatgaaatgtatgtgaaatggccttggtatgtttggttgctaattggattagctggtgtagctgtttgtgtgttgttattctttatatgttgctgcacaggttgtggctcatgttgttttaagaagtgtggaaattgttgtgatgagtatggaggacaccaggacagtattgtgatacataatatttcctctcatgaggattgactatcacagcctctcctggaaagacagaaaatctaaacaatttatagcattctcattgctacctggccccgtaagaggcagtcatagctatggccgtgttggtcctaaggctacattggctgctgtctttattggtccatttattgtagcatgtatgctaggcattggcctagtttatttattgcaattgcaagttcaaatttttcatgttaaggataccatacgtgtgactggcaagccagccactgtgtcttatactacaagtacaccagtaacaccgagcgcgacgacgctcgatggtactacgtatactttaattagacccactagctcttatacaagagtttatcttggtactccaagaggttttgattatagtacatttgggcctaagaccctagattatgttactaatctaaacctcatcttaattctggtcgtccatatacttttaaggcattgtccaggcatatgagaccaacagccacatggatttggcatgtgagtgatgcatggttacgccgcacgcgggactttggtgtcattcgcctagaagatttttgttttcaatttaattatagccaaccccgagttggttattgtagagttcctttaaaggcttggtgtagcaaccagggtaaatttgcagcgcagtttaccctaaaaagttgcgaaaaaccaggtcacgaaaaatttattactagcttcacggcctacggcagaactgtccaacaggccgttagcaagttagtagaagaagctgttgattttattctttttagggccacgcagctcgaaagaaatgtttaatttattccttacagacacagtatggtatgtggggcagattatttttatattcgcagtgtgtttgatggtcaccataattgtggttgccttccttgcgtctatcaaactttgtattcaactttgcggtttatgtaatactttggtgctgtccccttctatttatttgtatgataggagtaagcagctttataagtattataatgaagaaatgagactgcccctattagaggtggatgatatctaatctaaacattatgagtagtactactcaggccccagagcccgtctatcaatggacggccgacgaggcagttcaattccttaaggaatggaacttctcgttgggcattatactactctttattactatcatactacagttcggttacacgagccgtagcatgtttatttatgttgtgaaaatgataatcttgtggttaatgtggccactgactattgttttgtgtattttcaattgcgtgtatgcgctaaataatgtgtatcttggattttctatagtgtttactatagtgtccattgtaatctggattatgtattttgttaatagcataaggttgtttatcaggactggtagctggtggagcttcaaccccgaaacaaacaaccttatgtgtatagatatgaaaggtaccgtgtatgttagacccattattgaggattaccatacactaacagccactattattcgtggccacctctacatgcaaggtgttaagctaggcaccggtttctctttgtctgacttgcccgcttatgttacagttgctaaggtgtcacacctttgcacttataagcgcgcattcttagacaaggtagacggtgttagcggttttgctgtttatgtgaagtccaaggtcggaaattaccgactgccctcaaacaaaccgagtggcgcggacaccgcattgttgagaatctaatctaaactttaaggatgtcttttgttcctgggcaagaaaatgccggtggcagaagctcctctgtaaaccgcgctggtaatggaatcctcaagaagaccacttgggctgaccaaaccgagcgtggaccaaataatcaaaatagaggcagaaggaatcagccaaagcagactgcaactactcaacccaactccgggagtgtggttccccattactcctggttttctggcattacccagttccaaaagggaaaggagtttcagtttgcagaaggacaaggagtgcctattgccaatggaatccccgcttcagagcaaaagggatattggtatagacacaaccgccgttcttttaaaacacctgatgggcagcagaagcaattactgcccagatggtatttttactatcttggcacagggccccatgctggagccagttatggagacagcattgaaggtgtcttctgggttgcaaacagccaagcggacaccaatacccgctctgatattgtcgaaagggacccaagcagtcatgaggctattcctactaggtttgcgcccggcacggtattgcctcagggcttttatgttgaaggctctggaaggtctgcacctgctagccgatctggttcgcggtcacaatcccgtgggccaaataatcgcgctagaagcagttccaaccagcgccagcctgcctctactgtaaaacctgatatggccgaagaaattgctgctcttgttttggctaagctcggtaaagatgccggccagcccaagcaagtaacgaagcaaagtgccaaagaagtcaggcagaaaattttaaacaagcctcgccaaaagaggactccaaacaagcagtgcccagtgcagcagtgttttggaaagagaggccccaatcagaattttggaggctctgaaatgttaaaacttggaactagtgatccacagttccccattcttgcagagttggctccaacagttggtgccttcttctttggatctaaattagaattggtcaaaaagaattctggtggtgctgatgaacccaccaaagatgtgtatgagctgcaatattcaggtgcagttagatttgatagtactctacctggttttgagactatcatgaaagtgttgaatgagaatttgaatgcctaccagaaggatggtggtgcagatgtggtgagcccaaagccccaaagaaaagggcgtagacaggctcaggaaaagaaagatgaagtagataatgtaagcgttgcaaagcccaaaagctctgtgcagcgaaatgtaagtagagaattaaccccagaggatagaagtctgttggctcagatccttgatgatggcgtagtgccagatgggttagaagatgactctaatgtgtaaagagaatgaatcctatgtcggcgctcggtggtaacccctcgcgagaaagtcgggataggacactctctatcagaatggatgtcttgctgtcataacagatagagaaggttgtggcagaccctgtatcaattagttgaaagagattgcaaaatagagaatgtgtgagagaagttagcaaggtcctacgtctaaccataagaacggcgataggcgccccctgggaagagctcacatcagggtactattcctgcaatgccctagtaaatgaatgaagttgatcatggccaattggaagaatcacaaaaaaaaaaaaaaaaaaaaaaa

SEQ ID NO: 30060 - DNA, 31028 bp, Bovine coronavirus
  misc_structure (13335)...(13423): Frameshift Site
  misc_structure (13335)...(13341): Slippery Site
  misc_structure (13348)...(13423): Pseudoknot
  misc_structure (13348)...(13357): Stem 1 up
  misc_structure (13364)...(13368): Stem 2 down
  misc_structure (13371)...(13380): Stem 1 down
  misc_structure (13414)...(13418): Stem 2 up
gattgcgagcgatttgcgtgcgtgcatcccgcttcactgatctcttgttagatcttttcataatctaaactttataaaaacatccactccctgtagtctatgcctgtgggcgtagatttttcatagtggtgtctatattcatttctgctgttaacagctttcagccagggacgtgttgtatcctaggcagtggcccacccataggtcacaatgtcgaagatcaacaaatacggtctcgaactacactgggctccagaatttccatggatgtttgaggacgcagaggagaagttggacaaccctagtagttcagaggtggatatagtatgctccaccactgcgcaaaagctggaaacaggcggaatttgtcctgaaaatcatgtgatggtggattgtcgccgacttcttaaacaagaatgttgtgtgcagtctagcctaatacgtgaaattgttatgaatacacgtccatatgatttggaggtgctacttcaagatgctttgcagtcccgcgaagcagttttggttacaccccctctaggtatgtctctggaggcatgctatgtgagaggttgtaatcctaatggatggaccatgggtttgtttcggcgtagaagtgtgtgtaacactggtcgctgcgctgttaacaagcatgtggcctatcagctatatatgattgaccctgcgggtgtctgttttggtgcaggtcaatttgtgggttgggttatacccttagcctttatgcctgtgcaatcccggaaatttattgttccttgggttatgtacttgcgtaagtgtggcgaaaagggtgcctacaacaaagatcataaacgtggcggttttgaacacgtttataattttaaagttgaggatgcttacgacttggttcatgatgagcctaagggtaagttttctaagaaggcttatgctttaattagaggataccgtggtgttaaaccgcttctttatgtagaccagtatggttgtgattatactggtggtcttgcagatggcttagaggcttatgctgataagacattgcaagaaatgaaggcattatttcctatttggagccaggaactcccttttgatgtaactgtggcatggcacgttgtgcgtgatccacgttatgttatgagactgcaaagtgcttctactatacgtagtgttgcatatgttgctaaccctactgaagacttgtgtgatggttctgttgttataaaggaacctgtgcatgtttatgcggatgactctattattttacgtcaacataatttagttgacattatgagttgtttttatatggaggcagatgcagttgtaaatgctttttatggtgttgatttgaaagattgtggttttgttatgcagtttggttatattgactgcgaacaagacttgtgtgattttaaaggttgggttcctggtaatatgatagatggttttgcttgcactacttgtggtcatgtctatgagacaggtgatttgctagcacaatcttcaggtgttctgcctgttaatcctgtattgcatactaagagtgcagcaggttatggtggttttggttgtaaggattcttttaccctgtatggccaaactgtagtttattttggaggttgtgtgtattggagtccagcacgtaatatatggattcctatattaaaatcttctgttaagtcttatgacggtttggtttatactggagttgtaggttgcaaggctattgtaaaggaaacaaatctcatttgcaaagcgttgtaccttgattatgttcaacacaagtgtggcaatttacaccagcgggagttgctaggtgtgtcagatgtgtggcataaacaattgttattaaatagaggtgtgtacaaacctcttttagagaatattgattattttaatatgcggcgcgctaaatttagtttagaaacttttactgtttgtgcagatggttttatgccttttcttttagatgatttggttccgcgcgcatattatttggcagtaagtggtcaagcattttgtgactacgcagataaaatctgccatgctgttgtgtctaagagtaaagagttacttgatgtgtctctggattctttaagtgcagctatacattatttgaattctaaaattgttgatttggctcaacattttagtgattttggaacaagttttgtttctaaaattgttcatttctttaagacttttactactagcactgctcttgcatttgcatgggttttatttcatgttttgcatggtgcttatatagtagtagagagtgatatatattttgttaaaaacattcctcgttatgctagtgctgttgcacaagcatttcggagtgttgctaaagttgtactggactctttaagagttacttttattgatggcctttcttgttttaagattggacgtagaagaatttgtctctcaggcagtaaaatttatgaagttgagcgtggcttgttacattcatctcaattgccattagatgtttatgatttaaccatgcctagtcaagttcagaaagccaagcaaaaacctatttatttaaaaggttctggttctgatttttcattagcagatagtgtggttgaagttgttacaacttcacttacaccatgtggttattctgaaccacctaaagttgcagataaaatttgcattgtggataatgtttatatggccaaggctggtgacaaatattaccctgttgtggttgatggtcatgtaggactcttggatcaagcatggagggttccttgtgctggaaggcgtgttacatttaaggaacagcctacagtaaatgagattgcaagcacacctaagactattaaagttttttatgagcttgacaaagattttaatactattttaaacactgcatgtggagtgtttgaagtagatgataccgtggatatggaggaattttatgctgtggtgattgatgccatagaagagaaactttctccatgtaaggagcttgaaggtgtaggtgctaaagttagtgcctttttacagaaattagaggataattccctatttttatttgatgaggctggcgaggaagttcttgcttctaaattgtattgtgcttttacagctcctgaagatgatgactttcttgaagaaagtggtgttgaagaagatgatgtagaaggtgaggaaactgatttaactgtcacaagtgctggagagccttgtgttgccagtgaacaggaggagtcttctgaaatcttagaggacactttggatgatggtccatgtgtggagacatctgattcacaagttgaagaagatgtagaaatgtcggattttgctgatcttgaatctgtgattcaggattatgaaaatgtttgttttgagttttatactacagagccagaatttgttaaagttttggatctgtatgtgcctaaagcaactcgcaacaattgctggttgcgatcagttttggcagtgatgcagaaactgccctgtcaatttaaagataaaaatttgcaggatctttgggtgttatataagcaacagtatagtcagttgtttgttgataccttggttaataagatacctgctaatattgtagttccacaaggtggttatgttgccgattttgcatattggttcttaaccttatgtgattggcagtgtgttgcatactggaaatgcattaaatgtgatttagctcttaagcttaaaggcttggatgctatgttcttttatggtgatgttgtctcacatgtgtgcaagtgtggtgagtctatggtacttattgatgttgatgtgccatttacagcccactttgctcttaaagataagttgttttgtgcatttattactaagcgtagtgtgtataaagcagcttgtgttgtggatgttaatgatagtcattctatggctgttgttgatggtaaacaaattgatgatcatcgtgtcactagtattactagtgataagtttgattttattattgggcatggtatgtcattttcaatgactactttcgaaattgcccaattgtatggttcttgtataacacctaatgtatgttttgttaaaggtgatataattaaagtttctaagcgtgttaaagcagaagtcgttgtaaatcctgctaatggccatatggcacatggtggtggtgttgcaaaggctattgcagtagcagctggacagcagtttgttaaagagactaccgatatggttaagtctaaaggagtttgtgctactggagactgttatgtctctacagggggtaaattatgtaaaactgtgcttaatgttgttggacctgatgcgagaacacagggtaaacaaagttatgcattgttagagcgtgtttataaacatcttaacaaatatgattgtgttgttacaactttgatatcagctggtatatttagtgtgccgtctgatgtgtctttaacatatctacttggtactgccgagaaacaagttgttcttgttagcaataatcaagaggattttgatcttatttctaagtgtcagataactgccgttgagggcactaagaaattggcagagcgtctttcttttaatgtagggcgttctatcgtttacgaaacagatgctaataagttgattttaagcaatgacgttgcatttgtttcgacatttaatgtcttacaggatgttttatccttaagacatgatatagcacttgatgatgatgcacgaacctttgttcagagcaatgttgatgttgtacctgagggttggcgtgttgtcaataagttttatcaaattaatggtgttagaaccgttaagtattttgagtgtcccggtggcatagatatatgcagccaggataaagtttttggttatgtacagcagggtagttttaataaggctactgttgctcaaattaaagccttgtttttggataaagtggacatcttgctaactgttgatggtgtcaatttcactaacaggtttgtgcctgtaggtgaaagttttggtaagagtctaggaaatgtgttctgtgatggagttaatgtcacgaaacataagtgtgatataaattataaaggtaaagtctttttccagtttgataatctttctagtgaagatttaaaggctgtaagaagttcttttaattttgatcagaaggaattgcttgcctactacaacatgcttgttaattgttctaaatggcaggttgtttttaatggtaagtatttcacttttaagcaagctaataacaattgttttgttaatgtttcttgcttaatgctccagagtttgaatctgaaatttaaaattgttcaatggcaggaggcgtggcttgaatttcgttctggccgccctgctagatttgtatctttggttttagccaaaggtgggtttaaatttggtgatcctgctgactctagagatttcttgcgtgttgtgtttagtcaagttgatttgacaggggcaatatgtgattttgaaattgcatgtaaatgtggtgtaaagcaggaacagcgtactggtgtggacgctgttatgcattttggtacattgagtcgtgaagatcttgagattggttacaccgtggattgttcttgcggtaaaaagctaatccattgtgtacgatttgatgtaccatttttaatttgtagtaatacacctgctagtgtaaaattacctaagggtgtaggaagtgcaaatatttttaaaggtgataaggttggtcattatgttcatgttaagtgtgaacagtcttatcagctttatgatgcttctaatgttaagaaggttacagacgttactggcaatttgtcagattgtttgtatcttaaaaatttgaaacaaacttttaaatcggtgttaaccacctattatttggatgatgttaagaaaattgagtataaccctgacttgtcacaatattattgtgacggaggtaagtattatactcagcgtattattaaagcccaatttaaaacatttgagaaagtagatggtgtgtatactaattttaaattgataggacacaccatctgtgatattcttaatgctaagttgggttttgatagctctaaagagtttgttgaatataaagttactgagtggccaacagctacaggtgatgtggtgttggctactgatgatttgtatgttaagagatacgaaaggggttgtattacttttggtaaacctgttatatggttaagccatgagcaagcttccctcaattctttaacatattttaatagacctttattggttgatgagaataaatttgatgttttaaaagtggatgatgttgacgatggtggtgatatctcagagagtgatgccaaagaatccaaagaaatcaacattattaagttaagtggtgttaaaaaaccatttaaggttgaagatagtgtcatagttaatgatgatactagtgaaatcaaatatgttaagagtttgtctatagttgatgtgtatgatatgtggcttacaggttgtaggtatgttgttagaactgctaatgctttgagcatggcagttaacgtacctacaatacgtaagtttataaaatttggtatgactcttgttagtataccaattgatttgttaaatttaagagagattaagcctgtttttaatgtggttaaagctgtgcgaaataaaatttctgcatgctttaattttattaaatggctttttgtcttattatttggctggattaaaatatccgctgataataaagtaatttacaccacagaagttgcatcaaagcttacatgtaagcttgtagctttagcttttaaaaatgcgtttttgacatttaagtggagtgtggttgctagaggtgcttgcattatagcgactatatttctattgtggtttaattttatatatgccaatgtaatttttagtgatttttatttgcctaaaattggtttcttgccgacttttgttggtaagatcgcacagtggattaagagcacttttagtcttgtaactatttgtgatctatattccattcaggatgtgggttttaagaatcagtattgtaatggaagtatcgcatgtcaattctgcttggcaggatttgatatgttagataattataaagccattgatgtagtacagtatgaagctgataggagagcatttgttgattatacaggtgtgttaaagattgtcattgaattgatagttagttacgccctgtatacggcatggttctacccattgtttgctcttattagtattcagatcttgaccacttggctgcctgagctttttatgcttagtacattacattggagtgttaggttgctggtgtctttagctaatatgttaccagcacatgtgtttatgaggttttatattattattgcctcttttattaagctgtttatcttgtttaggcatgttgcctatggttgtagtaaacctggttgtttgttttgttacaagaggaatcgtagtctacgtgttaaatgtagtactattgttggtggcatgatacgctattacgatgttatggctaatggtggcactggcttttgttcaaaacatcaatggaattgcattgattgtgattcttataaaccaggtaatacttttattactgttgaggccgctcttgatttatctaaggaattgaaacggcctattcagcctacagatgttgcttatcatacggttacggatgttaagcaagttggttgttatatgcgcttgttctatgagcgtgatggacagcgcacatatgatgatgttaatgctagtttgtttgtggattatagtaatttgctacattctaaggttaagggtgtgcctaatatgcatgttgtggtagtggaaaatgatgccgataaagctaattttcttaatgctgctgtattttatgcacagtctttgtttagacctattttaatggttgataaaaatctgataactactgctaatactggtacgtctgttacagaaactatgtttgatgtttatgtggacacatttttgtctatgtttgatgtggataaaaagagtcttaatgctttaatagcaactgcgcattcttctataaaacagggtacgcagatttgtaaagttttggatacctttttaagctgtgctcgtaaaagttgttctattgattcagatgttgatactaagtgtttagctgattctgtcatgtctgctgtatcggcaggccttgaattgacggatgaaagttgtaataacttggtgccaacatatttgaagggtgataacattgtggcagctgatttaggtgttctgattcaaaattctgctaagcatgtgcagggtaatgttgctaaaatagccggtgtttcctgtatatggtctgtggatgcttttaatcagctaagttctgatttccagcataaattgaagaaagcatgttgtaaaactggtttgaaattgaagcttacttataataagcagatggctaatgtctctgttttaactacaccctttagtcttaaagggggtgcagtttttagttattttgtttatgtatgttttctgttgagtttggtttgttttattggattgtggtgcttaatgcccacttacacagtacacaaatcagattttcagcttcccgtttatgccagttataaagttttagataatggtgttattagagatgttagcgttgaagatgtttgtttcgctaacaaatttgaacaatttgatcaatggtatgagtctacatttggtctaagttattatagtaacagtatggcttgtcccattgttgttgctgtagtagaccaggatcttggctctactgtgtttaatgtccctaccaaagtgttacgatatggttaccatgtgttgcactttattacacatgcactttctgctgatggagtgcagtgttatacgccacatagtcaaatatcgtattctaatttttatgctagtggctgtgtgctttcctccgcttgtactatgtttgcaatggccgatggtagtccacaaccttattgttatacagaggggcttatgcagaatgcttctctgtatagttcattggtacctcacgtgcggtataatcttgctaatgctaaaggttttatccgttttccagaagtgttgcgagaaggacttgtgcgtattgtgcgtactcgttctatgtcgtattgcagagttggattatgtgaggaagctgatgagggtatatgctttaactttaatggttcttgggtgcttaataatgattattatagatcattgcctgggaccttttgtggtagagatgtttttgacttaatttatcagctttttaaaggtttagcacagcctgtggatttcttggcattgactgctagttctattgctggtgctatacttgctgtaattgttgttttggtgttttattacttaataaagcttaaacgtgcttttggtgattacaccagtattgtttttgtcaatgtgattgtgtggtgtgtaaattttatgatgctttttgtgtttcaagtttaccctacactttcttgtgtatatgctatttgttatttttatgccacgctttatttcccttcggagataagtgtgataatgcatttacaatggctagttatgtatggcactattatgcctttatggttttgtttgctatatatatctgttgttgtttcaaatcatgctttttgggtattcgcttactgcagacggcttggtacttctgttcgtagtgatggtacatttgaagaaatggctcttactacttttatgattacaaaagattcttattgtaagcttaagaattctttgtctgatgttgcttttaatagatatttgagtttgtataataaatataggtattacagcggtaaaatggatactgctgcatatagggaggctgcttgttcgcagttggctaaagcaatggatacatttaccaataataatggtagtgatgtgctttaccaaccacctactgcttccgtttcaacttcattcttgcaatctggtattgtgaaaatggttaatcctacttctaaggtagaaccatgtattgtcagtgttacctatggtaatatgacattgaatggtttatggttggatgataaggtctactgtcccagacatgtgatatgttctgcttcagatatgactaatccagattatacaaatttgttgtgtagagtaacatcaagtgattttactgtattgtttgatcgtttaagccttacagtgatgtcttatcaaatgcagggttgtatgcttgttcttacagtgaccctgcaaaattctcgtacgccaaaatatacatttggtgtggttaaacctggtgagacttttactgttttagctgcttataacggcaaaccacaaggagcctttcatgtgactatgcgtagtagttataccattaagggttcctttttatgcggatcttgtgggtctgttggttatgtgctaatgggtgattgtgttaaatttgtgtatatgcatcaattggagcttagtactggttgtcatactggtactgatttcaatggggatttttatggtccttataaggatgctcaggttgtccaattgcccgttcaggattatatacaatctgttaattttgtagcatggctttatgctgctatacttaataattgtaattggtttgtacaaagtgataagtgttctgttgaagattttaatgtgtgggctttgtctaatgggtttagccaagttaaatctgatcttgttatagatgctttagcttctatgactggtgtgtctttggaaacattattggctgctattaagcgtctcaagaatggttttcaaggacgtcagattatgggtagttgctcctttgaggatgaattgacacctagcgatgtttatcaacaactcgctggtatcaagttacaatcaaagcgtactagattggttaaaggcattgtttgttggattatggcttctacatttttgtttagttgtataattacagcatttgtgaaatggactatgtttatgtatgtaactactaatatgcttagtattacgttttgtgcactttgtgttataagtttggccatgttgttggttaaacataagcatctttatttgactatgtatataattcctgtgctttttacactgctgtataacaactatttggttgtgtacaagcagacatttagaggctatgtttatgcatggctatcatattatgttccatcagttgagtatacttatactgatgaagttatttacggcatgttattgcttataggaatggtctttgttacattacgtagcattaaccatgatttgttttcttttataatgtttgttggtcgtgtgatttctgttgtctctttgtggtacatgggttctaacttagaggaagaaattcttcttatgttggcttctctttttggtacttacacatggacaacagctttatctatggctgcagcaaaggttattgctaagtgggttgctgtgaatgttttgtatttcacagatatacctcaaattaagatagttcttgtatgctatttgtttataggttatattattagctgttattggggtttgttttccttgatgaacagtttgtttagaatgcctttgggtgtttataattataaaatttcagtacaggaattaagatatatgaatgctaatggattgcgccctcctaagaatagttttgaagcccttatgcttaattttaagcttttgggtattggaggtgtgccaattattgaagtatctcaatttcaatcaaaattgactgatgttaaatgtgctaatgttgtcttgcttaattgcttgcaacatttgcatgttgcttctaattctaagttgtggcagtattgtagcactttgcacaatgaaatacttgccacttctgatctgggtgttgcttttgaaaagcttgctcagttgttaattgttttgtttgctaatccagctgctgtggatagcaagtgcctgactagtattgaagaagtttgcgatgattacgcaaaggacaatactgttttgcaggctttacagagtgaatttgttaatatggctagcttcgttgaatatgaagttgctaagaaaaatcttgatgaggcgcgttctagtggttctgctaatcaacagcagttaaaacagctagagaaagcctgtaatattgctaaatctgcttatgaacgcgaccgtgctgtagcaagaaagttggagcgtatggcagatttggctctcactaatatgtataaagaagctagaattaatgataagaagagtaaggttgtttctgccttgcaaactatgctttttagtatggtgcgtaagttagataatcaagctctgaattcaatattagataatgctgtgaagggttgtgtaccattgaatgcaatcccttcattggctgcaaatactctgactataattgtaccagataaaagtgtttacgatcaggtagttgacaatgtctatgttacctatgcgggtaatgtatggcagattcaaactatccaagattcagatggtacaaataagcagttgaatgagatatctgatgattgtaactggccactagttattattgcaaatcggcataatgaggtatctgcaaccgttttgcaaaataatgaattaatgcctgctaagttgaaaactcaggtcgttaatagtggtccagatcagacttgtaacacacctactcaatgttactataataatagtaacaatgggaagattgtttatgctatacttagtgatgttgatggtcttaagtatacaaagattcttaaagatgatggcaattttgttgttttggagttagatcctccttgtaaatttactgttcaagatgttaaaggtcttaaaattaagtacctttattttgtaaaaggttgtaacacactagcaagaggctgggttgttggtacaatttcttctacagttagattgcaagctggaactgctactgagtatgcttccaactcatctatattatctttatgtgcgttttctgtagatcctaagaaaacgtatttagattttatacagcagggaggaacacctattgccaattgtgttaaaatgttgtgtgaccatgctggtaccggtatggccattactgttaaacccgatgctaccactaatcaggattcatatggtggtgcgtctgtttgtatatattgccgcgcacgagttgaacacccagatgttgatgggttgtgcaaattacgcggcaagtttgtacaagtgcctgtaggtataaaagatcctgtgtcttatgttttgacacatgatgtttgtcaagtttgtggattttggcgggatggaagttgttcatgtgttagcactgacactactgttcagtcaaaagatactaattttttaaacgggttcggggtacgagtgtagatgcccgtctcgtaccctgtgccagtggtttatctactgatgtacaattaagggcatttgatatttgcaatgctagtgttgctggcattggtttacatttaaaagttaattgctgccgttttcagcgtgttgatgagaacggtgataaattagatcagttctttgttgttaagaggacagatctgactatatataatagagagatggaatgctatgagcgtgtaaaagattgtaagtttgtggctgaacacgatttctttacatttgatgtagaaggtagtcgtgtgccacatattgtacgcaaggatttaacaaagtatactatgttggatctttgctatgcgttgcgacattttgatcgcaatgattgcatgctgctttgtgacattctctctatatatgctggttgtgaacaatcctactttactaagaaggattggtatgattttgttgaaaatcctgatattattaatgtttataaaaagctaggacctatttttaatagagccctagttagcgctactgagtttgcagacaaattggtggaggtaggcttagtaggcattttaacacttgataaccaagatttaaatggtaaatggtatgattttggtgactatgttattgcagccccaggttgtggtgttgctatagcagactcttattattcttatatgatgcctatgctgaccatgtgtcatgcattggattgtgaattgtatgtgaataatgcttatagactatttgatcttgtacagtatgattttactgattacaagctcgaattgtttaataagtattttaagcactggagtatgccataccatcctaacacggttgattgtcaggatgatcggtgtatcatacattgtgctaattttaacatactttttagtatggttttacctaatacatgttttgggcctcttgttaggcaaatttttgtggatggtgttccttttgttgtttcaattggataccattataaagaacttggtattgtgatgaatatggatgtggatacacatcgttatcgcttgtctttaaaagacttgcttttatatgctgctgatccagctttgcatgtagcttctgctagtgcattgtatgatttacgcacttgctgttttagtgttgcggctataacaagcggtgtaaaatttcaaacagttaaacctggtaattttaatcaggatttttatgattttattttaagtaagggcctgcttaaagagggtagttcagttgatctgaagcactttttctttacgcaggatggtaatgctgctatcactgattataattattataagtacaatttgcccaccatggtggacattaagcagttgttgtttgttttggaagttgtttataagtattttgagatttatgatggtgggtgtataccggcatcacaagtcattgttaataattatgataagagtgctggctatccatttaataaatttggaaaagccaggctctattatgaagcattatcatttgaggagcaggatgaaatttacgcctatactaagcgcaatgtcctgccaacacttactcaaatgaatttgaaatatgctattagtgctaagaatagagcccgcactgtcgctggtgtttccatacttagtactatgactggcagaatgtttcatcaaaagtgtttgaaaagtatagcagctacacgtggtgttcctgttgttataggcaccactaaattttatggcggctgggatgatatgttacgtcgccttattaaagatgttgataatcctgtacttatgggttgggattatcctaagtgtgatcgtgctatgccaaacatactacgtattgttagtagtctggttttggctcgaaaacatgaggcatgttgttcgcaaagcgataggttttatcgacttgcgaatgaatgcgcacaagttctgagtgaaattgttatgtgtggtggctgttattatgttaagcctggtggcactagtagtggtgatgcaactactgcttttgctaattcagtttttaacatatgtcaagctgtttcagccaatgtatgtgctttaatgtcatgcaatggtaataagattgaagatttgagtatacgtgctcttcagaagcgcttatactcacatgtgtatagaagtgatatggttgattcaacctttgtcacagaatattatgaatttttaaataagcattttagtatgatgattttgagtgatgatggcgttgtgtgttataattctgactatgcgtccaaagggtatattgctaatataagtgcctttcaacaggtattgtattatcaaaataacgtttttatgtcagaatccaaatgttgggttgaaaatgacataaataatggacctcatgaattctgttcacaacacacaatgcttgtaaagatggatggggacgatgtctatcttccatatcctgatcctagtcgtatattaggagctggatgttttgtagatgatttgttaaagactgatagtgttcttttaatagaacgatttgtaagtcttgcaatagatgcttatccacttgtgtaccacgaaaatgaagaataccaaaaggtttttcgtgtttatttggagtatataaagaagttgtacaatgacctgggtaatcagatcttggatagctacagtgttattttaagtacttgtgatggacaaaagtttactgatgagtccttttacaagaacatgtatttaagaagtgcagttatgcagagtgttggagcttgcgtggtctgctcttctcaaacatcattacgttgtggcagttgcatcagaaagcctcttctttgctgcaagtgttgttacgatcatgttatggcaactgatcataaatatgttttgagtgtttcaccatatgtgtgtaatgcaccaggatgtgatgtaaatgatgttaccaaattgtatctaggtggtatgtcatattattgtgaagatcataagccacaatattcgtttaagttggtaatgaatggtatggtttttggtctatataaacaatcttgtacaggatctccgtacatagatgattttaatcgtatagctagttgtaaatggactgatgttgatgattacatactggctaatgaatgtacagagcgcttgaaattgtttgctgcagaaacgcaaaaggcgactgaggaagcctttaagcagagttatgcatcagcaacaatacaagagattgttagcgagcgcgaattgatcctctcttgggagattggaaaagtgaagccaccacttaataaaaattatgtttttactggctaccattttactaaaaatggcaagacagttttaggtgagtatgtttttgataagagtgagttgactaatggtgtgtattatcgcgccacaaccacttataagctatctgttggagatgtttttgttttaacctctcattcagtagctaatttaagtgctcctacgctggtgccgcaggagaattatagtagtattagattcgctagtgtttatagtgtgcttgagacgtttcagaacaatgtcgttaattatcaacacattggtatgaaacgttattgcaccgtgcaaggacctcctggtacaggaaagtcacatcttgctattggtcttgctgtttattattgtacagcacgtgtagtatacactgcggccagccatgcagctgttgacgcattgtgtgaaaaagcatacaaatttttgaatataaatgactgcactcgtattgttcctgccaaggtcagggtggagtgctatgataagtttaaaattaatgacaccactcgtaagtatgtgtttactactataaatgcattacctgagatggtgactgatattgttgttgtagatgaagttagtatgcttaccaattatgagctttctgttattaatgctcgtattcgtgctaagcattatgtttacattggtgatcctgctcaattgccagcaccacgtgtgttattgagcaagggtacacttgaacctaaatattttaacactgttactaagcttatgtgttgcttagggccagacatttttcttggtacatgttatagatgtcctaaggaaattgttgatacagtgtctgccttggtttatgaaaataagcttaaggctaagaatgaaagtagttcattgtgttttaaggtctattataaaggcgttacaacacatgaaagttctagtgctgtaaatatgcagcagatttatttgattaataagtttttgaaggctaaccctttgtggcataaagccgtttttattagcccatataatagccagaactttgcagctaagcgtgttttgggtttgcaaacccagaccgtggattctgctcaaggttctgaatatgattatgttatatattcacagactgcagaaacagcgcattctgtaaatgttaatcgcttcaatgttgctattactcgagccaagaaaggtattctttgtgttatgagtaatatgcagttgtttgaagcattacagtttactacattgaccttagataaagtgccacaggccgttgaaacgagagttcaatgtagtaccaatttatttaaagattgtagcaagagttatagtggttaccacccagctcacgctccttcatttttggcagtagatgacaaatataaggcaactggcgatttagccgtgtgtcttggtattggagattctgctgttacatattcaagattaatatcactcatgggttttaaacttgatgtcacccttgatgggtattgtaagctttttataactaaagaagaagctgttaaacgcgtgcgtgcttgggttggctttgatgctgaaggcgctcatgccacgcgtgatagcattgggacaaatttcccacttcaattagggttttctacaggaattgattttgttgtggaagccactggtttgtttgctgatagagatggttacagctttaaaaaggctgtggctaaagctcctcctggtgaacaatttaagcatctcatccctttgatgacgagaggtcagcgctgggatgttgttagacctagaatagtacaaatgtttgcagatcatttaattgatctgtctgattgtgttgtgctagttacatgggcagccaactttgagctcacttgtctccgatactttgcaaaagtaggtcgtgagatctcttgtaatgtgtgcactaaacgtgccacagcttacaattctagaactggttactatggttgttggcgccatagtgttacatgtgattacttgtataatccacttattgttgatattcaacagtggggatatattggatctttatcaagtaatcatgatttatattgtagtgtccacaaaggagcacatgttgcttcatctgatgctataatgacacggtgtttggccgtttatgattgtttttgcaataatattaattggaatgtggagtatcccattatttcaaatgagttaagtattaatacctcttgtagggtcttgcagcgtgttatgcttaaagctgcaatgctctgcaacagatatactttgtgttatgatattggcaacccaaaagcgattgcctgtgtcaaagattttgattttaagttctatgatgcccaaccaattgttaagtctgtcaagactcttttgtattcttttgaggcacataaggactcttttaaagatggtttgtgtatgttttggaactgtaatgtggataagtatccaccgaatgcagttgtatgtagatttgacacgagagtgttgaataatttaaatcttcctggctgtaatggaggtagtttgtatgttaataaacatgcattccacactaaacccttttctagggcagcctttgagcatttgaagcctatgccatttttctattattcagatacgccttgtgtgtatatggatggcatggatgctaagcaggttgattatgtacctttgaaatccgccacttgcatcacaagatgcaatttaggtggtgcagtttgtttaaaacatgctgaagagtatcgtgagtacctagagtcttacaatacagctactacagcaggttttactttttgggtctataagacatttgatttttataatttgtggaatacgttcaccaagctacaaagcttggagaacgttgtatataatttagtcaaaactggtcattatacaggacaggctggtgaaatgccttgtgccattataaatgataaagtcgtggctaagatcgataaggaggatgttgtcatttttattaataatacaacataccctactaatgttgctgttgaattatttgccaagcgcagtattcgacaccatccagagcttaagctctttagaaatttgaatatagacgtgtgttggaagcacgtcatttgggattatgctagagaaagtatattttgcagtaatacctatggtgtctgcatgtatacagatttaaagttcattgataaattgaatgtcctttttgatggtcgtgataatggtgctcttgaagcttttaaacgctctaataatggcgtttacatttccacgacaaaagttaagagtctttcgatgataaaaggtccaccgcgtgctgaattaaatggcgtagtggtggacaaggttggagacactgattgtgtgttttattttgctgtgcgtaaagagggtcaggatgtcatcttcagccaattcgacagcctgagagtcagctctaaccagagcccacaaggtaatctggggagtaatgaacccggtaatgtcggtggtaatgatgctctggcaacctccactatctttacacaaagccgtgttattagctcttttacatgtcgtactgatatggaaaaagattttatagctttagatcaagacttgtttattcagaagtatggtttggaggactatgcctttgaacacattgtttatggtaatttcaaccagaagattattggtggtttgcatttgttaataggcttgtaccgaagacagcaaacttccaatctggttattcaggagtttgtttcatacgactccagcatacactcttattttatcactgatgagaagagtggtggtagtaagagtgtttgcactgttatagatattttgttggatgattttgtggctcttgttaagtcacttaatctcaactgtgtgagtaaggttgttaacgttaatgttgattttaaagattttcagttcatgctttggtgtaacgatgagaaagttatgactttctatcctcgtttgcaagctgcatctgactggaagcctggttattctatgcctgtattatacaagtatttgaattccccaatggaaagagttagtctctggaattatgggaagccggttactttgcctacaggctgtatgatgaatgttgctaagtatactcagttatgtcaatatctgaatactacaacattagctgtacctgttaatatgcgagttttgcatttaggtgcaggttcagaaaaaggagtagcaccgggttctgcagttcttaggcagtggttgcctgctggtactattcttgtagataatgatttatacccatttgtgagtgacagtgtcgctacatattttggggattgtataaccttaccctttgattgtcaatgggatttgataatttctgatatgtatgaccctattactaagaacataggggagtacaatgtaagtaaagatggtttctttacatacatttgtcatatgattcgcgacaagttagctctgggtggcagtgttgctataaaaataacagagttttcttggaatgcagaattatataagttaatggggtattttgcattttggacggttttctgcacaaatgcaaacgcttcttctagtgaagggtttttaattggcataaattatttgggtaagcccaaggttgagatagatggaaatgttatgcatgccaattatttgttttggagaaattccacagtttggaacgggggtgcttatagcctgtttgacatggctaaattcccgcttaagttggctggtactgccgtaataaatttaagagcagaccagattaatgatatggtttattcccttcttgaaaagggtaaactacttgttagagatacaaataaagaagtttttgttggtgacagtttggttaatgtaatctaaactttaagaatggcagtcgcttatgcagacaagcctaatcactttatcaattttccacttacccagtttcagggctttgtgttaaattataaaggtttacaatttcaacttctcgatgaaggagtggattgtaaaatacaaacagcgcctcacattagtcttgctatgctggatattcagcctgaagactacagaagtgttgatgttgctattcaagaagttattgatgatatgcattggggtgagggctttcagattaaatttgaaaacccccatatcctaggaagatgcatagttttagatgttaaaggtgtagaagaattgcatgatgatttagttaattacattcgtgataaaggttgtgttgctgaccaatccaggaagtggattggacattgcaccatagcccaactcactgatgctgcactttccattaaggaaaatgttgattttataaacaacatgcaattcaactataaaatcactatcaatccctcatcaccggctagacttgaaatagttaagcttggtgctgaaaggaaagatggtttttatgaaaccatagctagccactggatgggaattcgttttgaatataatccacccactgataagctagctatgattatgggttattgttgtttagaagtggtgcgtaaagagctagaagaaggtgaccttcccgagaatgatgatgatgcttggtttaagctatcgtaccattatgaaaacaattcttggttctttcgacatgtctacaggaaaagttcttatttccgtaagtcttgtcaaaatttagattgtaattgtttggggttttatgaatcttcagttgaagaagactaaactcagtgaaaatgtttttgcttcctagatttgttctagttagctgcataattggtagcctaggttttgacaaccctcctaccaatgttgtttcgcatttaaatggagattggtttttatttggtgacagtcgttcagattgtaatcatgttgttactaccaacccccgtaattattcttatatggaccttaatcctgccttgtgtggttctggtaaaatatcatctaaagctggcaactccatttttaggagttttcactttaccgatttttataattacacaggcgaaggtcaacaaattattttctatgagggtgttaattttacgccttatcatgcctttaaatgcaccacttctggtagtaatgatatttggatgcagaataaaggcttgttttacactcaggtttataagaatatggctgtgtatcgcagccttacttttgttaatgtaccatatgtttataatggctctgcacaatctacagccctttgtaaatctggtagtttagttcttaataaccctgcatatatagctcgtgaagctaattttggggattattattataaggttgaagctgatttttatttgtcaggttgtgacgagtatatcgtaccactttgtattttcaacggcaagtttttgtcgaatacaaagtattatgatgatagtcaatattattttaataaagacactggtgttatttatggtctcaattctactgaaaccattaccactggttttgactttaattgtcattatttagttctaccctctggtaattatttagccatttcaaatgagctattgttaactgttcctactaaagcaatctgtcttaataagcgtaaggattttacgcctgtacaggttgttgattcgcggtggaacaatgccaggcagtctgataacatgacggcagttgcttgtcaacccccgtactgttattttcgtaattctactaccaattatgttggtgtttatgatatcaatcatggggatgctggttttactagcatactcagtggtttgttatatgactcaccttgtttttcgcagcaaggtgtttttaggtatgataatgttagcagtgtctggcctctctacccctatggcagatgccctactgctgctgatattaatacccctgatgtacctatttgtgtgtatgatccgctaccaattattttgcttggcattcttttgggtgttgcggtcataattattgtagttttgttgttatattttatggtggataatggtactaggctgcatgatgcttagaccataatctaaacatgtttttgatacttttaatttccttaccaacggcttttgctgttataggagatttaaagtgtactacagtttccattaatgatgttgacactggtgttccttctattagcactgatactgtcgatgttactaatggtttaggtacttattatgttttagatcgtgtgtatttaaatactacgttgttgcttaatggttactaccctacttcaggttctacatatcgtaatatggcactgaagggaactttactattgagcacactgtggtttaaaccaccttttctttctgattttactaatggtatttttgctaaggtcaaaaataccaaggttattaaagatggtgtaatgtatagtgagtttcctgctataactataggtagtacttttgtaaatacatcttatagtgtggtagtacaaccacatactaccattttgggtaataaattacaaggtttcttagagatctctgtttgccagtatactatgtgcgagtacccaaatacgatttgtaatcctaatctgggtaatcaacgcgtagaactatggcattgggatacaggtgttgtttcctgtttatataagcgtaatttcacatacgatgtgaatgctgattatttgtatttccatttttatcaagaaggtggtactttttatgcatattttacagacactggtgttgttactaagtttctgtttaatgtttatttaggcacggtgctctcacattattatgtcatgcctttgacttgtaatagtgctctgactttagaatattgggttacacccctcacttctaaacaatatctactagctttcaatcaagatggtgttatttttaatgctgttgattgtaagagtgattttatgagtgagattaagtgtaaaacactatctatagcaccatctactggtgtttatgaattaaacggttacactgttcagccaattgcagatgtttaccgacgtatacctaatcttcccgattgcaatattgaggcttggcttaatgataagtcggtgccctctccattaaattgggaacgtaagaccttttcaaattgtaattttaatatgagcagcctgatgtcttttattcaggcatactcatttacttgtaataatattgatgctgctaagatatatggtatgtgtttttccagcataactatagataagtttgcaatacccaatggtaggaaggttgacctacaattgggtaatttgggctatttgcagtcttttaattatagaattgatactactgctacaagttgtcagttgtattataatttacctgctgctaatgtttctgttagcaggtttaatccttctacttggaataggagatttggttttacagaacaatctgtttttaagcctcaacctgcaggtgtttttactgatcatgatgttgtttatgcacaacattgttttaaagcttccacaaatttctgtccgtgtaaattggatgggtctttgtgtgtaggtaatggtcctggtatagatgctggttataaaactagtggcataggcacttgtcctgcaggtactaattatttaacttgccataatgctgcccaatgtgattgtttgtgcaccccagaccccattacatctaaagctacagggccttacaagtgcccccaaactaaatatttagttggcataggtgagcactgttcgggtcttgctattaaaagtgatcattgtggaggtaatccttgtacttgccaaccacaagcatttttgggttggtctgttgactcttgtttacaaggggataggtgtaatatttttgctaattttattttgcatgatgttaatagtggtactacttgttctactgatttacaaaaatcaaacacagacataattcttggtgtttgtgttaattatgatctttatggtattactggccaaggtatttttgttgaggttaatgcgacttattataatagttggcagaaccttttatatgattctaatggtaatctctatggttttagagactacttaacaaatagaacttttatgattcgtagttgctatagtggtcgtgtttcagcggcctttcatgctaactcttccgaaccagcattgctatttcggaatatcaaatgcaattacgtttttaataacactctttcacgacagctgcaacctattaactattttgatagctatcttggttgtgttgtcaatgctgataatagtacttctagtgttgttcaaacatgtgatctcacagtaggtagtggttactgtgtggattactctacaaaaagacgaagtcgtagatcgattaccactggttatcggtttactaattttgagccatttactgttaattcagtaaatgatagtttagaacctgtaggtggtttgtatgaaattcaaataccttcagagtttactataggtaatatggaggagtttattcaaacaagctctcctaaagttactattgattgttctgcttttgtctgtggtgattatgcagcatgtaaatcacagttggttgaatatggtagcttctgtgacaatattaatgctatactcacagaagtaaatgaactacttgacactacacagttgcaagtagctaatagtttaatgaatggtgtcactcttagcactaagcttaaagatggcgttaatttcaatgtagacgacatcaatttttcccctgtattaggttgtttaggaagcgattgcaataaagtttccagtagatctgctatagaggacttacttttttctaaagtaaagttatctgatgtcggtttcgttgaggcttataataattgtactggaggtgccgaaattagggacctcatttgtgtgcaaagttataatggtatcaaggtgttgcctccactgctctcggaaaatcagatcagtggatacactttggctgccacttctgctagcctgtttcctccatggtcagcagcagcaggtgtaccattctatttaaacgttcagtatcgtattaatggtattggtgttaccatggatgtgttaagtcaaaatcaaaagcttattgctaatgcatttaacaatgctcttggtgctattcaggaagggtttgatgctaccaattctgctttagttaaaattcaagctgttgttaatgcaaatgctgaagctcttaataacttattgcaacaactctctaatagatttggtgctataagttcttctttacaagaaattctatctagactggatgctcttgaagcgcaagctcagatagacagacttattaatgggcgtcttaccgctcttaatgcttatgtttctcaacagcttagtgactctacactagtaaagtttagtgcagcacaagctatggagaaggttaatgaatgtgtcaaaagccaatcatctaggataaatttttgtggtaatggtaatcatattatatcattagtgcagaatgctccatatggtttgtattttatccactttagctatgtccctactaagtatgtcactgcgaaggttagtcccggcctgtgcattgctggtgatagaggtatagcccctaagagtggttattttgttaatgtaaataatacttggatgttcactggtagtggttattactaccctgaacctataactggaaataatgttgttgttatgagtacctgtgctgttaattatactaaagcgccggatgtaatgctgaacatttcaacacccaacctcccttattttaaggaagagttggatcaatggtttaaaaaccaaacatcagtggcaccagatttgtcacttgattatataaatgttacattcttggacctacaagatgaaatgaataggttacaggaggcaataaaagttttaaatcagagctacatcaatctcaaggacattggtacatatgagtattatgtaaaatggccttggtatgtatggcttttaattggctttgctggtgtagctatgcttgttttactattcttcatatgctgttgtacaggatgtgggactagttgttttaagaaatgtggtggttgttgtgatgattatactggacaccaggagttagtaattaaaacatcacatgaagactaagttcgtctttgatttattgactcctgacgatatattacatccctccaatcatgtgaatctaattataagacccatttaggtcgagcatattataatagctaccacaatgcctgctgtttagtgggtactgtgtcttatataactagtaaacctgcaatgccaatggctacaaccattgaaggtgcagattatactaacattatgcctattactgttcttacaacagtttatttaggcgtttctataggtattgacactagcaccactggttttacctgtttttcatggtactagttccaaaccatattataatttaggtagaccttataactttaagcattattgccaaagtttttaaggccacgccctagtaatggacatctggaaacctgagattaaatatctccgttatactaacggttttaatgtctcagaattagaagatgcttgttttaaatttaactataaatttcctaaagtaggatattgtagagttcctagtcatgcttggtgccgtaatcaaggtagcttttgtgctacactcactctttatggcaaatccaaacattatgataaatattttggagtaataactggttttacagcattcgctaatactgtagaggaggctgtcaacaaactggttttcttagctgttgactttattacctggcgtagacaggagttaaatgtttatggctgatgcttattttgcagacactgtgtggtatgtggggcaaataatttttatagttgccatttgtttattggttataatagttgtagtggcatttttggcaacttttaaattgtgtattcaactttgcggtatgtgtaataccttagtactgtccccttctatttatgtgtttaatagaggtaggcagttttatgagttttacaatgatgtaaaaccaccagttcttgatgtggatgacgtttagttaatccaaacattatgagtagtgtaactacaccagcaccagtttacacctggactgctgatgaagctattaaattcctaaaggaatggaacttttctttgggtattatactactttttattacagtcatattgcaatttggatatacaagtcgcagtatgtttgtttatgttattaagatggtcattttgtggcttatgtggccccttactatcatcttaactattttcaattgcgtgtatgcgttgaataatgtgtatcttggcttctctatagtttttactatagtggccattattatgtggattgtgtattttgtgaatagtatcaggttgtttattagaactggaagttggtggagtttcaacccagaaacaaacaacttgatgtgtatagatatgaagggaaggatgtatgttaggccgataattgaggactaccatacccttacggtcacaataatacgtggtcatctttacatgcaaggtataaaactaggtactggctattctttgtcagatttgccagcttatgtgactgttgctaaggtctcgcacctgctcacgtataagcgtggttttcttgacaagataggcgatactagtggttttgctgtttatgttaagtccaaagtcggtaattaccgactgccatcaacccaaaagggttctggcttggacaccgcattgttgagaaataatatctaaactttaaggatgtcttttactcctggtaagcaatccagtagtagagcgtcctctggaaatcgttctggtaatggcatccttaagtgggccgatcagtccgaccaatctagaaatgttcaaaccaggggtagaagagctcaacccaagcaaactgctacttctcagcaaccatcaggagggaatgttgtaccctactattcttggttctctggaattactcagtttcaaaagggaaaggagtttgaatttgcagagggacaaggtgtgcctattgcaccaggagtcccagctactgaagctaaggggtactggtacagacacaaccgacgttcctttaaaacagccgatggcaaccagcgtcaattgctaccacgatggtatttttactatcttggaacaggaccgcatgccaaagaccagtatggcaccgacattgacggagtctactgggtcgctagtaaccaggctgatgtcaataccccggctgacattctcgatcgggacccaagtagcgatgaggctattccgactaggtttccgcctggcacggtactccctcagggttactatattgaaggctcaggaaggtctgctcctaattccagatctacttcacgcgcatccagtagagcctctagtgcaggatcgcgcagtagagccaattctggcaatagaacccctacctctggtgtaacacctgatatggctgatcaaattgctagtcttgttctggctaaacttggcaaggatgccgctaagccacagcaagtaactaagcagactgccaaagaaatcagacagaaaattttgaataaaccccgccagaagaggagccccaataaacaatgcactgttcagcagtgttttgggaagagaggccccaatcagaattttggtggtggagaaatgttaaaacttggaactagtgatccacagttccccattcttgcagaactcgcacccacagctggtgcgtttttctttggatcaagattagagttggccaaagtgcagaatttgtctgggaatcttgacgagccccagaaggatgtttatgaattgcgctataatggcgcaattagatttgatagtacactttcaggttttgagaccataatgaaggtgttgaatgagaatttgaatgcataccaacaacaggatggtacgatgaatatgagtccaaaaccacagcgtcagcgtggtcagaagaacggacaaggagaaaatgataatataagtgttgcagcgcccaaaagccgtgtgcagcaaaataagattagagagttgactgcagaggacatcagccttcttaagaagatggatgagccctttactgaagacacctcagaaatataagagaatgaaccttatgtcggcacctggtggtaacccctcgcaggaaagtcgggataaggcactctctatcagaatggatgtcttgctgctataatagatagagaaggttatagcagactatagattaattagttgaaagttttgtgtggtaatgtatagtgttggagaaagtgaaagacttgcggaagtaattgccgacaagtgcccaaggggaagagccagcatgttaagttaccatccagtaattagtaaatgaatgaagttaattatggccaattggaagaatcac

SEQ ID NO: 30061 - DNA, 6769 bp, Artificial Sequence
  Frameshift Reporter Plasmid pSARS1
gacggatcgggagatctcccgatcccctatggtgcactctcagtacaatctgctctgatgccgcatagttaagccagtatctgctccctgcttgtgtgttggaggtcgctgagtagtgcgcgagcaaaatttaagctacaacaaggcaaggcttgaccgacaattgcatgaagaatctgcttagggttaggcgttttgcgctgcttcgcgatgtacgggccagatatacgcgttgacattgattattgactagttattaatagtaatcaattacggggtcattagttcatagcccatatatggagttccgcgttacataacttacggtaaatggcccgcctggctgaccgcccaacgacccccgcccattgacgtcaataatgacgtatgttcccatagtaacgccaatagggactttccattgacgtcaatgggtggagtatttacggtaaactgcccacttggcagtacatcaagtgtatcatatgccaagtacgccccctattgacgtcaatgacggtaaatggcccgcctggcattatgcccagtacatgaccttatgggactttcctacttggcagtacatctacgtattagtcatcgctattaccatggtgatgcggttttggcagtacatcaatgggcgtggatagcggtttgactcacggggatttccaagtctccaccccattgacgtcaatgggagtttgttttggcaccaaaatcaacgggactttccaaaatgtcgtaacaactccgccccattgacgcaaatgggcggtaggcgtgtacggtgggaggtctatataagcagagctctctggctaactagagaacccactgcttactggcttatcgaaattaatacgactcactatagggagacccaagctggctagcatgtctgcggatgcatcaacgctgctgaaacgggtttgcggtgtaagtgcagcccgtcttacaccgtgcggcacaggcactagtactgatgtcgtctacagggcttttgagggatccatggaagacgccaaaaacataaagaaaggcccggcgccattctatccgctggaagatggaaccgctggagagcaactgcataaggctatgaagagatacgccctggttcctggaacaattgcttttacagatgcacatatcgaggtggacatcacttacgctgagtacttcgaaatgtccgttcggttggcagaagctatgaaacgatatgggctgaatacaaatcacagaatcgtcgtatgcagtgaaaactctcttcaattctttatgccggtgttgggcgcgttatttatcggagttgcagttgcgcccgcgaacgacatttataatgaacgtgaattgctcaacagtatgggcatttcgcagcctaccgtggtgttcgtttccaaaaaggggttgcaaaaaattttgaacgtgcaaaaaaagctcccaatcatccaaaaaattattatcatggattctaaaacggattaccagggatttcagtcgatgtacacgttcgtcacatctcatctacctcccggttttaatgaatacgattttgtgccagagtccttcgatagggacaagacaattgcactgatcatgaactcctctggatctactggtctgcctaaaggtgtcgctctgcctcatagaactgcctgcgtgagattctcgcatgccagagatcctatttttggcaatcaaatcattccggatactgcgattttaagtgttgttccattccatcacggttttggaatgtttactacactcggatatttgatatgtggatttcgagtcgtcttaatgtatagatttgaagaagagctgtttctgaggagccttcaggattacaagattcaaagtgcgctgctggtgccaaccctattctccttcttcgccaaaagcactctgattgacaaatacgatttatctaatttacacgaaattgcttctggtggcgctcccctctctaaggaagtcggggaagcggttgccaagaggttccatctgccaggtatcaggcaaggatatgggctcactgagactacatcagctattctgattacacccgagggggatgataaaccgggcgcggtcggtaaagttgttccattttttgaagcgaaggttgtggatctggataccgggaaaacgctgggcgttaatcaaagaggcgaactgtgtgtgagaggtcctatgattatgtccggttatgtaaacaatccggaagcgaccaacgccttgattgacaaggatggatggctacattctggagacatagcttactgggacgaagacgaacacttcttcatcgttgaccgcctgaagtctctgattaagtacaaaggctatcaggtggctcccgctgaattggaatccatcttgctccaacaccccaacatcttcgacgcaggtgtcgcaggtcttcccgacgatgacgccggtgaacttcccgccgccgttgttgttttggagcacggaaagacgatgacggaaaaagagatcgtggattacgtcgccagtcaagtaacaaccgcgaaaaagttgcgcggaggagttgtgtttgtggacgaagtaccgaaaggtcttaccggaaaactcgacgcaagaaaaatcagagagatcctcataaaggccaagaagggcggaaagatcgccgtgtaattctagagcggccgctcgagtctagagggcccgtttaaacccgctgatcagcctcgactgtgccttctagttgccagccatctgttgtttgcccctcccccgtgccttccttgaccctggaaggtgccactcccactgtcctttcctaataaaatgaggaaattgcatcgcattgtctgagtaggtgtcattctattctggggggtggggtggggcaggacagcaagggggaggattgggaagacaatagcaggcatgctggggatgcggtgggctctatggcttctgaggcggaaagaaccagctggggctctagggggtatccccacgcgccctgtagcggcgcattaagcgcggcgggtgtggtggttacgcgcagcgtgaccgctacacttgccagcgccctagcgcccgctcctttcgctttcttcccttcctttctcgccacgttcgccggctttccccgtcaagctctaaatcgggggtccctttagggttccgatttagtgctttacggcacctcgaccccaaaaaacttgattagggtgatggttcacgtacctagaagttcctattccgaagttcctattctctagaaagtataggaacttccttggccaaaaagcctgaactcaccgcgacgtctgtcgagaagtttctgatcgaaaagttcgacagcgtctccgacctgatgcagctctcggagggcgaagaatctcgtgctttcagcttcgatgtaggagggcgtggatatgtcctgcgggtaaatagctgcgccgatggtttctacaaagatcgttatgtttatcggcactttgcatcggccgcgctcccgattccggaagtgcttgacattggggaattcagcgagagcctgacctattgcatctcccgccgtgcacagggtgtcacgttgcaagacctgcctgaaaccgaactgcccgctgttctgcagccggtcgcggaggccatggatgcgatcgctgcggccgatcttagccagacgagcgggttcggcccattcggaccgcaaggaatcggtcaatacactacatggcgtgatttcatatgcgcgattgctgatccccatgtgtatcactggcaaactgtgatggacgacaccgtcagtgcgtccgtcgcgcaggctctcgatgagctgatgctttgggccgaggactgccccgaagtccggcacctcgtgcacgcggatttcggctccaacaatgtcctgacggacaatggccgcataacagcggtcattgactggagcgaggcgatgttcggggattcccaatacgaggtcgccaacatcttcttctggaggccgtggttggcttgtatggagcagcagacgcgctacttcgagcggaggcatccggagcttgcaggatcgccgcggctccgggcgtatatgctccgcattggtcttgaccaactctatcagagcttggttgacggcaatttcgatgatgcagcttgggcgcagggtcgatgcgacgcaatcgtccgatccggagccgggactgtcgggcgtacacaaatcgcccgcagaagcgcggccgtctggaccgatggctgtgtagaagtactcgccgatagtggaaaccgacgccccagcactcgtccgagggcaaaggaatagcacgtactacgagatttcgattccaccgccgccttctatgaaaggttgggcttcggaatcgttttccgggacgccggctggatgatcctccagcgcggggatctcatgctggagttcttcgcccaccccaacttgtttattgcagcttataatggttacaaataaagcaatagcatcacaaatttcacaaataaagcatttttttcactgcattctagttgtggtttgtccaaactcatcaatgtatcttatcatgtctgtataccgtcgacctctagctagagcttggcgtaatcatggtcatagctgtttcctgtgtgaaattgttatccgctcacaattccacacaacatacgagccggaagcataaagtgtaaagcctggggtgcctaatgagtgagctaactcacattaattgcgttgcgctcactgcccgctttccagtcgggaaacctgtcgtgccagctgcattaatgaatcggccaacgcgcggggagaggcggtttgcgtattgggcgctcttccgcttcctcgctcactgactcgctgcgctcggtcgttcggctgcggcgagcggtatcagctcactcaaaggcggtaatacggttatccacagaatcaggggataacgcaggaaagaacatgtgagcaaaaggccagcaaaaggccaggaaccgtaaaaaggccgcgttgctggcgtttttccataggctccgcccccctgacgagcatcacaaaaatcgacgctcaagtcagaggtggcgaaacccgacaggactataaagataccaggcgtttccccctggaagctccctcgtgcgctctcctgttccgaccctgccgcttaccggatacctgtccgcctttctcccttcgggaagcgtggcgctttctcatagctcacgctgtaggtatctcagttcggtgtaggtcgttcgctccaagctgggctgtgtgcacgaaccccccgttcagcccgaccgctgcgccttatccggtaactatcgtcttgagtccaacccggtaagacacgacttatcgccactggcagcagccactggtaacaggattagcagagcgaggtatgtaggcggtgctacagagttcttgaagtggtggcctaactacggctacactagaaggacagtatttggtatctgcgctctgctgaagccagttaccttcggaaaaagagttggtagctcttgatccggcaaacaaaccaccgctggtagcggtggtttttttgtttgcaagcagcagattacgcgcagaaaaaaaggatctcaagaagatcctttgatcttttctacggggtctgacgctcagtggaacgaaaactcacgttaagggattttggtcatgagattatcaaaaaggatcttcacctagatccttttaaattaaaaatgaagttttaaatcaatctaaagtatatatgagtaaacttggtctgacagttaccaatgcttaatcagtgaggcacctatctcagcgatctgtctatttcgttcatccatagttgcctgactccccgtcgtgtagataactacgatacgggagggcttaccatctggccccagtgctgcaatgataccgcgagacccacgctcaccggctccagatttatcagcaataaaccagccagccggaagggccgagcgcagaagtggtcctgcaactttatccgcctccatccagtctattaattgttgccgggaagctagagtaagtagttcgccagttaatagtttgcgcaacgttgttgccattgctacaggcatcgtggtgtcacgctcgtcgtttggtatggcttcattcagctccggttcccaacgatcaaggcgagttacatgatcccccatgttgtgcaaaaaagcggttagctccttcggtcctccgatcgttgtcagaagtaagttggccgcagtgttatcactcatggttatggcagcactgcataattctcttactgtcatgccatccgtaagatgcttttctgtgactggtgagtactcaaccaagtcattctgagaatagtgtatgcggcgaccgagttgctcttgcccggcgtcaatacgggataataccgcgccacatagcagaactttaaaagtgctcatcattggaaaacgttcttcggggcgaaaactctcaaggatcttaccgctgttgagatccagttcgatgtaacccactcgtgcacccaactgatcttcagcatcttttactttcaccagcgtttctgggtgagcaaaaacaggaaggcaaaatgccgcaaaaaagggaataagggcgacacggaaatgttgaatactcatactcttcctttttcaatattattgaagcatttatcagggttattgtctcatgagcggatacatatttgaatgtatttagaaaaataaacaaataggggttccgcgcacatttccccgaaaagtgccacctgacgtc

SEQ ID NO: 30062 - DNA, 6769 bp, Artificial Sequence
  Frameshift Reporter Plasmid pSARS2
gacggatcgggagatctcccgatcccctatggtgcactctcagtacaatctgctctgatgccgcatagttaagccagtatctgctccctgcttgtgtgttggaggtcgctgagtagtgcgcgagcaaaatttaagctacaacaaggcaaggcttgaccgacaattgcatgaagaatctgcttagggttaggcgttttgcgctgcttcgcgatgtacgggccagatatacgcgttgacattgattattgactagttattaatagtaatcaattacggggtcattagttcatagcccatatatggagttccgcgttacataacttacggtaaatggcccgcctggctgaccgcccaacgacccccgcccattgacgtcaataatgacgtatgttcccatagtaacgccaatagggactttccattgacgtcaatgggtggagtatttacggtaaactgcccacttggcagtacatcaagtgtatcatatgccaagtacgccccctattgacgtcaatgacggtaaatggcccgcctggcattatgcccagtacatgaccttatgggactttcctacttggcagtacatctacgtattagtcatcgctattaccatggtgatgcggttttggcagtacatcaatgggcgtggatagcggtttgactcacggggatttccaagtctccaccccattgacgtcaatgggagtttgttttggcaccaaaatcaacgggactttccaaaatgtcgtaacaactccgccccattgacgcaaatgggcggtaggcgtgtacggtgggaggtctatataagcagagctctctggctaactagagaacccactgcttactggcttatcgaaattaatacgactcactatagggagacccaagctggctagcatgtctgcggatgcatcaacgtttttaaacgggtttgcggtgtaagtgcagcccgtcttacaccgtgcggcacaggcactagtactgatgtcgtctacagggcttttgagggatccatgggaagacgccaaaaacataaagaaaggcccggcgccattctatccgctggaagatggaaccgctggagagcaactgcataaggctatgaagagatacgccctggttcctggaacaattgcttttacagatgcacatatcgaggtggacatcacttacgctgagtacttcgaaatgtccgttcggttggcagaagctatgaaacgatatgggctgaatacaaatcacagaatcgtcgtatgcagtgaaaactctcttcaattctttatgccggtgttgggcgcgttatttatcggagttgcagttgcgcccgcgaacgacatttataatgaacgtgaattgctcaacagtatgggcatttcgcagcctaccgtggtgttcgtttccaaaaaggggttgcaaaaaattttgaacgtgcaaaaaaagctcccaatcatccaaaaaattattatcatggattctaaaacggattaccagggatttcagtcgatgtacacgttcgtcacatctcatctacctcccggttttaatgaatacgattttgtgccagagtccttcgatagggacaagacaattgcactgatcatgaactcctctggatctactggtctgcctaaaggtgtcgctctgcctcatagaactgcctgcgtgagattctcgcatgccagagatcctatttttggcaatcaaatcattccggatactgcgattttaagtgttgttccattccatcacggttttggaatgtttactacactcggatatttgatatgtggatttcgagtcgtcttaatgtatagatttgaagaagagctgtttctgaggagccttcaggattacaagattcaaagtgcgctgctggtgccaaccctattctccttcttcgccaaaagcactctgattgacaaatacgatttatctaatttacacgaaattgcttctggtggcgctcccctctctaaggaagtcggggaagcggttgccaagaggttccatctgccaggtatcaggcaaggatatgggctcactgagactacatcagctattctgattacacccgagggggatgataaaccgggcgcggtcggtaaagttgttccattttttgaagcgaaggttgtggatctggataccgggaaaacgctgggcgttaatcaaagaggcgaactgtgtgtgagaggtcctatgattatgtccggttatgtaaacaatccggaagcgaccaacgccttgattgacaaggatggatggctacattctggagacatagcttactgggacgaagacgaacacttcttcatcgttgaccgcctgaagtctctgattaagtacaaaggctatcaggtggctcccgctgaattggaatccatcttgctccaacaccccaacatcttcgacgcaggtgtcgcaggtcttcccgacgatgacgccggtgaacttcccgccgccgttgttgttttggagcacggaaagacgatgacggaaaaagagatcgtggattacgtcgccagtcaagtaacaaccgcgaaaaagttgcgcggaggagttgtgtttgtggacgaagtaccgaaaggtcttaccggaaaactcgacgcaagaaaaatcagagagatcctcataaaggccaagaagggcggaaagatcgccgtgtaattctagagcggccgctcgagtctagagggcccgtttaaacccgctgatcagcctcgactgtgccttctagttgccagccatctgttgtttgcccctcccccgtgccttccttgaccctggaaggtgccactcccactgtcctttcctaataaaatgaggaaattgcatcgcattgtctgagtaggtgtcattctattctggggggtggggtggggcaggacagcaagggggaggattgggaagacaatagcaggcatgctggggatgcggtgggctctatggcttctgaggcggaaagaaccagctggggctctagggggtatccccacgcgccctgtagcggcgcattaagcgcggcgggtgtggtggttacgcgcagcgtgaccgctacacttgccagcgccctagcgcccgctcctttcgctttcttcccttcctttctcgccacgttcgccggctttccccgtcaagctctaaatcgggggtccctttagggttccgatttagtgctttacggcacctcgaccccaaaaaacttgattagggtgatggttcacgtacctagaagttcctattccgaagttcctattctctagaaagtataggaacttccttggccaaaaagcctgaactcaccgcgacgtctgtcgagaagtttctgatcgaaaagttcgacagcgtctccgacctgatgcagctctcggagggcgaagaatctcgtgctttcagcttcgatgtaggagggcgtggatatgtcctgcgggtaaatagctgcgccgatggtttctacaaagatcgttatgtttatcggcactttgcatcggccgcgctcccgattccggaagtgcttgacattggggaattcagcgagagcctgacctattgcatctcccgccgtgcacagggtgtcacgttgcaagacctgcctgaaaccgaactgcccgctgttctgcagccggtcgcggaggccatggatgcgatcgctgcggccgatcttagccagacgagcgggttcggcccattcggaccgcaaggaatcggtcaatacactacatggcgtgatttcatatgcgcgattgctgatccccatgtgtatcactggcaaactgtgatggacgacaccgtcagtgcgtccgtcgcgcaggctctcgatgagctgatgctttgggccgaggactgccccgaagtccggcacctcgtgcacgcggatttcggctccaacaatgtcctgacggacaatggccgcataacagcggtcattgactggagcgaggcgatgttcggggattcccaatacgaggtcgccaacatcttcttctggaggccgtggttggcttgtatggagcagcagacgcgctacttcgagcggaggcatccggagcttgcaggatcgccgcggctccgggcgtatatgctccgcattggtcttgaccaactctatcagagcttggttgacggcaatttcgatgatgcagcttgggcgcagggtcgatgcgacgcaatcgtccgatccggagccgggactgtcgggcgtacacaaatcgcccgcagaagcgcggccgtctggaccgatggctgtgtagaagtactcgccgatagtggaaaccgacgccccagcactcgtccgagggcaaaggaatagcacgtactacgagatttcgattccaccgccgccttctatgaaaggttgggcttcggaatcgttttccgggacgccggctggatgatcctccagcgcggggatctcatgctggagttcttcgcccaccccaacttgtttattgcagcttataatggttacaaataaagcaatagcatcacaaatttcacaaataaagcatttttttcactgcattctagttgtggtttgtccaaactcatcaatgtatcttatcatgtctgtataccgtcgacctctagctagagcttggcgtaatcatggtcatagctgtttcctgtgtgaaattgttatccgctcacaattccacacaacatacgagccggaagcataaagtgtaaagcctggggtgcctaatgagtgagctaactcacattaattgcgttgcgctcactgcccgctttccagtcgggaaacctgtcgtgccagctgcattaatgaatcggccaacgcgcggggagaggcggtttgcgtattgggcgctcttccgcttcctcgctcactgactcgctgcgctcggtcgttcggctgcggcgagcggtatcagctcactcaaaggcggtaatacggttatccacagaatcaggggataacgcaggaaagaacatgtgagcaaaaggccagcaaaaggccaggaaccgtaaaaaggccgcgttgctggcgtttttccataggctccgcccccctgacgagcatcacaaaaatcgacgctcaagtcagaggtggcgaaacccgacaggactataaagataccaggcgtttccccctggaagctccctcgtgcgctctcctgttccgaccctgccgcttaccggatacctgtccgcctttctcccttcgggaagcgtggcgctttctcatagctcacgctgtaggtatctcagttcggtgtaggtcgttcgctccaagctgggctgtgtgcacgaaccccccgttcagcccgaccgctgcgccttatccggtaactatcgtcttgagtccaacccggtaagacacgacttatcgccactggcagcagccactggtaacaggattagcagagcgaggtatgtaggcggtgctacagagttcttgaagtggtggcctaactacggctacactagaaggacagtatttggtatctgcgctctgctgaagccagttaccttcggaaaaagagttggtagctcttgatccggcaaacaaaccaccgctggtagcggtggtttttttgtttgcaagcagcagattacgcgcagaaaaaaaggatctcaagaagatcctttgatcttttctacggggtctgacgctcagtggaacgaaaactcacgttaagggattttggtcatgagattatcaaaaaggatcttcacctagatccttttaaattaaaaatgaagttttaaatcaatctaaagtatatatgagtaaacttggtctgacagttaccaatgcttaatcagtgaggcacctatctcagcgatctgtctatttcgttcatccatagttgcctgactccccgtcgtgtagataactacgatacgggagggcttaccatctggccccagtgctgcaatgataccgcgagacccacgctcaccggctccagatttatcagcaataaaccagccagccggaagggccgagcgcagaagtggtcctgcaactttatccgcctccatccagtctattaattgttgccgggaagctagagtaagtagttcgccagttaatagtttgcgcaacgttgttgccattgctacaggcatcgtggtgtcacgctcgtcgtttggtatggcttcattcagctccggttcccaacgatcaaggcgagttacatgatcccccatgttgtgcaaaaaagcggttagctccttcggtcctccgatcgttgtcagaagtaagttggccgcagtgttatcactcatggttatggcagcactgcataattctcttactgtcatgccatccgtaagatgcttttctgtgactggtgagtactcaaccaagtcattctgagaatagtgtatgcggcgaccgagttgctcttgcccggcgtcaatacgggataataccgcgccacatagcagaactttaaaagtgctcatcattggaaaacgttcttcggggcgaaaactctcaaggatcttaccgctgttgagatccagttcgatgtaacccactcgtgcacccaactgatcttcagcatcttttactttcaccagcgtttctgggtgagcaaaaacaggaaggcaaaatgccgcaaaaaagggaataagggcgacacggaaatgttgaatactcatactcttcctttttcaatattattgaagcatttatcagggttattgtctcatgagcggatacatatttgaatgtatttagaaaaataaacaaataggggttccgcgcacatttccccgaaaagtgccacctgacgtc

SEQ ID NO: 30063 - DNA, 6766 bp, Artificial Sequence
  Frameshift Reporter Plasmid pSARS3
gacggatcgggagatctcccgatcccctatggtgcactctcagtacaatctgctctgatgccgcatagttaagccagtatctgctccctgcttgtgtgttggaggtcgctgagtagtgcgcgagcaaaatttaagctacaacaaggcaaggcttgaccgacaattgcatgaagaatctgcttagggttaggcgttttgcgctgcttcgcgatgtacgggccagatatacgcgttgacattgattattgactagttattaatagtaatcaattacggggtcattagttcatagcccatatatggagttccgcgttacataacttacggtaaatggcccgcctggctgaccgcccaacgacccccgcccattgacgtcaataatgacgtatgttcccatagtaacgccaatagggactttccattgacgtcaatgggtggagtatttacggtaaactgcccacttggcagtacatcaagtgtatcatatgccaagtacgccccctattgacgtcaatgacggtaaatggcccgcctggcattatgcccagtacatgaccttatgggactttcctacttggcagtacatctacgtattagtcatcgctattaccatggtgatgcggttttggcagtacatcaatgggcgtggatagcggtttgactcacggggatttccaagtctccaccccattgacgtcaatgggagtttgttttggcaccaaaatcaacgggactttccaaaatgtcgtaacaactccgccccattgacgcaaatgggcggtaggcgtgtacggtgggaggtctatataagcagagctctctggctaactagagaacccactgcttactggcttatcgaaattaatacgactcactatagggagacccaagctggctagcatgtctgcggatgcatcaacgctgaacgggtttgcggtgtaagtgcagcccgtcttacaccgtgcggcacaggcactagtactgatgtcgtctacagggcttttgagggatccatgggaagacgccaaaaacataaagaaaggcccggcgccattctatccgctggaagatggaaccgctggagagcaactgcataaggctatgaagagatacgccctggttcctggaacaattgcttttacagatgcacatatcgaggtggacatcacttacgctgagtacttcgaaatgtccgttcggttggcagaagctatgaaacgatatgggctgaatacaaatcacagaatcgtcgtatgcagtgaaaactctcttcaattctttatgccggtgttgggcgcgttatttatcggagttgcagttgcgcccgcgaacgacatttataatgaacgtgaattgctcaacagtatgggcatttcgcagcctaccgtggtgttcgtttccaaaaaggggttgcaaaaaattttgaacgtgcaaaaaaagctcccaatcatccaaaaaattattatcatggattctaaaacggattaccagggatttcagtcgatgtacacgttcgtcacatctcatctacctcccggttttaatgaatacgattttgtgccagagtccttcgatagggacaagacaattgcactgatcatgaactcctctggatctactggtctgcctaaaggtgtcgctctgcctcatagaactgcctgcgtgagattctcgcatgccagagatcctatttttggcaatcaaatcattccggatactgcgattttaagtgttgttccattccatcacggttttggaatgtttactacactcggatatttgatatgtggatttcgagtcgtcttaatgtatagatttgaagaagagctgtttctgaggagccttcaggattacaagattcaaagtgcgctgctggtgccaaccctattctccttcttcgccaaaagcactctgattgacaaatacgatttatctaatttacacgaaattgcttctggtggcgctcccctctctaaggaagtcggggaagcggttgccaagaggttccatctgccaggtatcaggcaaggatatgggctcactgagactacatcagctattctgattacacccgagggggatgataaaccgggcgcggtcggtaaagttgttccattttttgaagcgaaggttgtggatctggataccgggaaaacgctgggcgttaatcaaagaggcgaactgtgtgtgagaggtcctatgattatgtccggttatgtaaacaatccggaagcgaccaacgccttgattgacaaggatggatggctacattctggagacatagcttactgggacgaagacgaacacttcttcatcgttgaccgcctgaagtctctgattaagtacaaaggctatcaggtggctcccgctgaattggaatccatcttgctccaacaccccaacatcttcgacgcaggtgtcgcaggtcttcccgacgatgacgccggtgaacttcccgccgccgttgttgttttggagcacggaaagacgatgacggaaaaagagatcgtggattacgtcgccagtcaagtaacaaccgcgaaaaagttgcgcggaggagttgtgtttgtggacgaagtaccgaaaggtcttaccggaaaactcgacgcaagaaaaatcagagagatcctcataaaggccaagaagggcggaaagatcgccgtgtaattctagagcggccgctcgagtctagagggcccgtttaaacccgctgatcagcctcgactgtgccttctagttgccagccatctgttgtttgcccctcccccgtgccttccttgaccctggaaggtgccactcccactgtcctttcctaataaaatgaggaaattgcatcgcattgtctgagtaggtgtcattctattctggggggtggggtggggcaggacagcaagggggaggattgggaagacaatagcaggcatgctggggatgcggtgggctctatggcttctgaggcggaaagaaccagctggggctctagggggtatccccacgcgccctgtagcggcgcattaagcgcggcgggtgtggtggttacgcgcagcgtgaccgctacacttgccagcgccctagcgcccgctcctttcgctttcttcccttcctttctcgccacgttcgccggctttccccgtcaagctctaaatcgggggtccctttagggttccgatttagtgctttacggcacctcgaccccaaaaaacttgattagggtgatggttcacgtacctagaagttcctattccgaagttcctattctctagaaagtataggaacttccttggccaaaaagcctgaactcaccgcgacgtctgtcgagaagtttctgatcgaaaagttcgacagcgtctccgacctgatgcagctctcggagggcgaagaatctcgtgctttcagcttcgatgtaggagggcgtggatatgtcctgcgggtaaatagctgcgccgatggtttctacaaagatcgttatgtttatcggcactttgcatcggccgcgctcccgattccggaagtgcttgacattggggaattcagcgagagcctgacctattgcatctcccgccgtgcacagggtgtcacgttgcaagacctgcctgaaaccgaactgcccgctgttctgcagccggtcgcggaggccatggatgcgatcgctgcggccgatcttagccagacgagcgggttcggcccattcggaccgcaaggaatcggtcaatacactacatggcgtgatttcatatgcgcgattgctgatccccatgtgtatcactggcaaactgtgatggacgacaccgtcagtgcgtccgtcgcgcaggctctcgatgagctgatgctttgggccgaggactgccccgaagtccggcacctcgtgcacgcggatttcggctccaacaatgtcctgacggacaatggccgcataacagcggtcattgactggagcgaggcgatgttcggggattcccaatacgaggtcgccaacatcttcttctggaggccgtggttggcttgtatggagcagcagacgcgctacttcgagcggaggcatccggagcttgcaggatcgccgcggctccgggcgtatatgctccgcattggtcttgaccaactctatcagagcttggttgacggcaatttcgatgatgcagcttgggcgcagggtcgatgcgacgcaatcgtccgatccggagccgggactgtcgggcgtacacaaatcgcccgcagaagcgcggccgtctggaccgatggctgtgtagaagtactcgccgatagtggaaaccgacgccccagcactcgtccgagggcaaaggaatagcacgtactacgagatttcgattccaccgccgccttctatgaaaggttgggcttcggaatcgttttccgggacgccggctggatgatcctccagcgcggggatctcatgctggagttcttcgcccaccccaacttgtttattgcagcttataatggttacaaataaagcaatagcatcacaaatttcacaaataaagcatttttttcactgcattctagttgtggtttgtccaaactcatcaatgtatcttatcatgtctgtataccgtcgacctctagctagagcttggcgtaatcatggtcatagctgtttcctgtgtgaaattgttatccgctcacaattccacacaacatacgagccggaagcataaagtgtaaagcctggggtgcctaatgagtgagctaactcacattaattgcgttgcgctcactgcccgctttccagtcgggaaacctgtcgtgccagctgcattaatgaatcggccaacgcgcggggagaggcggtttgcgtattgggcgctcttccgcttcctcgctcactgactcgctgcgctcggtcgttcggctgcggcgagcggtatcagctcactcaaaggcggtaatacggttatccacagaatcaggggataacgcaggaaagaacatgtgagcaaaaggccagcaaaaggccaggaaccgtaaaaaggccgcgttgctggcgtttttccataggctccgcccccctgacgagcatcacaaaaatcgacgctcaagtcagaggtggcgaaacccgacaggactataaagataccaggcgtttccccctggaagctccctcgtgcgctctcctgttccgaccctgccgcttaccggatacctgtccgcctttctcccttcgggaagcgtggcgctttctcatagctcacgctgtaggtatctcagttcggtgtaggtcgttcgctccaagctgggctgtgtgcacgaaccccccgttcagcccgaccgctgcgccttatccggtaactatcgtcttgagtccaacccggtaagacacgacttatcgccactggcagcagccactggtaacaggattagcagagcgaggtatgtaggcggtgctacagagttcttgaagtggtggcctaactacggctacactagaaggacagtatttggtatctgcgctctgctgaagccagttaccttcggaaaaagagttggtagctcttgatccggcaaacaaaccaccgctggtagcggtggtttttttgtttgcaagcagcagattacgcgcagaaaaaaaggatctcaagaagatcctttgatcttttctacggggtctgacgctcagtggaacgaaaactcacgttaagggattttggtcatgagattatcaaaaaggatcttcacctagatccttttaaattaaaaatgaagttttaaatcaatctaaagtatatatgagtaaacttggtctgacagttaccaatgcttaatcagtgaggcacctatctcagcgatctgtctatttcgttcatccatagttgcctgactccccgtcgtgtagataactacgatacgggagggcttaccatctggccccagtgctgcaatgataccgcgagacccacgctcaccggctccagatttatcagcaataaaccagccagccggaagggccgagcgcagaagtggtcctgcaactttatccgcctccatccagtctattaattgttgccgggaagctagagtaagtagttcgccagttaatagtttgcgcaacgttgttgccattgctacaggcatcgtggtgtcacgctcgtcgtttggtatggcttcattcagctccggttcccaacgatcaaggcgagttacatgatcccccatgttgtgcaaaaaagcggttagctccttcggtcctccgatcgttgtcagaagtaagttggccgcagtgttatcactcatggttatggcagcactgcataattctcttactgtcatgccatccgtaagatgcttttctgtgactggtgagtactcaaccaagtcattctgagaatagtgtatgcggcgaccgagttgctcttgcccggcgtcaatacgggataataccgcgccacatagcagaactttaaaagtgctcatcattggaaaacgttcttcggggcgaaaactctcaaggatcttaccgctgttgagatccagttcgatgtaacccactcgtgcacccaactgatcttcagcatcttttactttcaccagcgtttctgggtgagcaaaaacaggaaggcaaaatgccgcaaaaaagggaataagggcgacacggaaatgttgaatactcatactcttcctttttcaatattattgaagcatttatcagggttattgtctcatgagcggatacatatttgaatgtatttagaaaaataaacaaataggggttccgcgcacatttccccgaaaagtgccacctgacgtc
